United States Patent Application Publication US 2025/0304934 A1 - sequence listing, part 3

SEQ ID NO: 309 - DNA, 21035 bp, Chlamydomonas sp.
  source 1..21035: mol_type = other DNA
ggaagtggggcggattatgatacggcaatgactccgaacatcggagcggtggggatgttatccacagccaattccgccacccgaagaaagaaataacctgggactggctgggggctggagggcataaacaacaacatccagggggattatggaacaagtaatcaggagaatcaagtggcgaagattgcacggtcactagatggaaaaatggaatccggtaaaggaattgtggcaaatacggtgatcacatcgtcaagcagaggttcggctagagcaattagatcacagtgcggatagcgctgatagggatcaatcgctaggactcgctgcccggagtgggcatgtgggtttagacccagaaccagtcacgtgtcaagtggtatcaatcatatgcatcaacacgcaaaactgggaagaaaactgtcgcatatccacaccgccgtcaggccatgcaatgacaccggattcgcgtgtgcgatcctcgccatcgtcaatcatcgtcctccgcggatggtttaaataatcgaagtgaatgaataatgatggacagtggcaaaccacaaccacgcacgtatcggacaacatcaggccgcaacgcaaggaggagcactgtcatcgtccatccatcagatccacatgcaaaacggctaacatgtcctcggcctcgtctcagtccgtgccaaaagacaccacggacacccattgtctcgtcctctggctcctaggcattcggaggataagagcgtagggatgatctctaagttgttcagaaaagaaggattgcgcagccaaaaagcacgacgactgtctcggccttcaaggaaccatctcaaggaagcgtattacaagggcccaggaaagccttcacaatggaatggaagagagtctgcagatcgtctctttgtacagaggaaatactcgtcttactaagcgcaagcggtgcggctacccttgaagcagcttctctcgcttccgatagattagccatacgctgcgagtgcgcaaaccggttggtacgaccggggtatattggcggcaatccccagcagatgcgatccgcggtgcagggcttgagccacacgcttcactcagctcgactcttaatgaggcggctcatgcaaaggaggaagatgtacggatcggaaattcggtccattcgggtctcgaagcgaagataagtaacaaaaaaaaagaaagtctgtcatgtacgggggatcgtcggggtttttatcatgtccgcagccgatcgatttagtctaacaacacggccagccagcactacactcgatgtggttggaggggcttctggccactcactaacgtgggtacccactcggttttagagggacggagctctcaaggacgacgcatgtgtcgagtccgggtcgagtcactgcaggaatcgatccatacgtgggaactgtgctagtcagcaaatcactggcgacatctcgcatcacggcggaacctgtcgtgctcgcactgcatcacgaacctgtgcgtgctcatacgcatcacgtgcggaactgtcaatgacatctcccgcatacccggacggctacctacgctcgtcgtgtcgagatctacagcattctccgctctgcatcacactttggcggcacctggccgagtcgaggtcacaagcgatcagcgaccgcctcagcattacatgacggcggaacggtcgattcgagtcgatcacatctcacatgaggcttattctctccgcatcatggcacacctagcgaggagtcggtcacccatccctcactacattggcgaccatctgcgcgcaggcggcgcacaggggcgatgtcgtcaatcacatctacaatcacatcacagggcgacctctcggtcgatcacgggcggcaccgctgtcgaggtcacatcacagagcgacctccatcatcggcatcaaggaacggggcaccttggcgccgctctccacggggcaacaccgacggtacctgcgtgcgtccggataaaccccgaaacccccgctgcgtaggagacatacgcgaggcagaaggggaaatgaaagagatttgtgctgtgtccaatcaccgcaccctcgagagggccccagatatcatcacgcgtaacctgctgccggtctgtcctgctggacggtctgggcatgtctctgtccgggccccagaatccaaacagactggaccatgcgttggttccagatggcgcaggcaggggagggagtgcagcagaggttccctgataggtgcgccagcgaactaaccaatgcgtctcccatacaggaacatgccgcaatgcggagtgcgaggtggggcgaaagactcgaggaatgggcgttttcggtcctttgattgcagagggcagcaattgtggtaggggaatcgcgggggatactcaagaccaacagaaccgagatcatgtcaccaacaggaatgagccacataaaggatccccgagattcagctaacctagaccagccgagctaccaaagctgccctgcgatgcaggcagaggggagcagtgcggtcgcatcaagctcagaggtaggacgttcgagggatgtacatgggactttaaggagtggaacagtgaccaagtcaaccattgttttaaaccgatattcgcaatacgagaccggggttctgttcctctgtggcttcactgatagccccccacccctgcgacgccaactccactcccaacgcccagaggacctcggcgcatcacacactacatccggggaactgagagtcgaggcaaagataaccaaaccacttggatgagaccacgtcgccacagaaaagagacagcgcgtgagcccctttccatccccacacggcggagcgatgggcgacctggaggtagccctccaacgagggtccactacgaggtaacactgcagcagaggtggggcgaccgtcaggggagcccacagtcacatcagcttggaagatcgagatcgtcagcgtatcggaggacagcaaacaacggcggaaaactgtccgatgtatgcgaggaccaacatgcggcacgctgtccgaatgatatccggaagcggaatggggggggccccgggaacacgtcgagtatccgagaaggcagaacacgtctatacagatacggacccgagcacaacggcggaaacgtcggtgggcgcagccacaccgtccgtaccgtccgtccattcatacacattcaggtacccacccggaatgctgggcggagcatcgtcctcttcaatggtccaattgtacacaacctgttgcaacacaagcagcacagcaaggcacagcaaggcacagcaagtttttaactcctgatttacatctgactattttcattttatgagggggggtgggtgaagtgcagcggcagttaaaacagatgatgatgatgatgcggtgtgtgcagtgtggagggaagctaccagtagtttaagtaatcctttatcaatgtctttaccggtcaacaaatgtttgaagtgctgaacccgctcgactggacaatacattgccagaagatgtagctgaggtagcccatatgttgcccctttgtagaaggatacacgatcgtgaacaggtgttatcggctcagtatgaggtttcatatcattattgaattctgcgatggtattgttcacaagttgaacccactcgcttgtgtccatagtcacggcggaccgtgctgtatcctccatttcattgcgccttgggtttacgaagaaagttgacagatcaagagacgacatttactttataccgcaactacatttaaaaaaaaaaaaatagacctgctttcactcgtggttcgaggctactgcatggggggcacgtgtcgtatcaagaagacctctgcttgacaaatatgtcgggaatcaaggtgggcaggaataaaagttgattatatatgtacatacaaatgtcggacactacatacaccaatactcatacaccaccctgtacggacggggggctgcaaaagccgccatggcatgtgtgtgtgtgcgaatgaatgatggacggggacggaaacactttgtcggctctgacctgctttcacctcacttgcttgttcactgccctccccccagacacccatgcactccggctttaatcaaaggcgacacttagtgttccgtgtacgcctcgaaaaacgagtatctgaccaagcgataatgttccaaatgttgttcgtcagtataaacattaacatgtgggtccttcgtgaaggcagcgctgaatactcggaggagccctgtgggttactgtaactgaaggtgagtgggcttgcttgtcacacttttgttcatgcaacagcaaggagagctaatcggctaatacactcaagaccgtcatggaatggcgtatctacccgacgttgggagggcatgtatgcactattctcaagcacatggaagaggctgtgactctgccccattccttgggactctggtatacaaaggggagacacattttctggcattttattgtccagtcgagcggggtcaacacttcaaacatttgatgatcggtaaagacattgattgataaaggaagtgcatttgcgcggtcactgtgccacagaatttcccccacatacatggaaagcgattgattgcctttcttttactcgcaggatgatggtcaacaacatgtacccaacacttattatagcggttgcaacaaacattgcgcttttcgtatacctccaccgtcgtgacgaggcctatcgtgatgagacctatcgtgctgaggcccgtgctgacaataaagctactgcccgttgtgcggaagctactgcccgtcgtgaggctgaggcccgtgctgacaatgaagctactgcccgtcgtgaggctgaggcccgtgctgacaatgaagctactgcccgttgtgcggaagctactgcccgtcgtgaggctgaggcccgtgctgcggaggctaaggccagtctcaggcaagagttgttgtcgttatcgcctgatgacgtcgctgctatgactcctgaacacgttgcggagtatatgacggcgtgtgcctcggttggggtagcagcatttcatttggatcagccggtattgtgataattgcttttttaaatacatacatgtcacacaatcacgtgacgaattgaaccctcagaatcgccctctgggaagtgtactggttgacataagtgaggcggcgcacatccaggcgagcgccgacagcggaccccggtctgcagcatttgtatctgtagacaaacgacgtagcatatatatatatatatatagataggatagataggatagataggataacgcactttatcacgacacatgccgtatcctcacacacgcgtatcggcggatgctgtcgagagattcgcagtcgcaacgaattggaggaccaaagcgttgaggatattttatgtttatttttttatatcgaggccaaattatatggtaggatggacaaatgctggcgtgcactccctaaggacatcattttttcccacatccttccaaaatgtgatattgatacgaggctggcatttaaaatccctccttcgaagatgtgctcgcaacgatacaaatcatctgacttcgtagagaccttgcgacacagatatgtgccagaccggatacaacaagttatgggtgttcagtatgtattgatcccaatgcacacaatttccggttggtatgacaacagcgatgcagaaatcaggcatgcaatggttaatttaggcatctattatgattttgctgggtaccgtcggaacaagatatacaaggattccattcaaatcacggtgatctgtatagattacagagatgccaataaatatcccatatcagatacagttgctcaactatggattaagccccgttgcctctgatgtcgaaacacataattgtattcccattgtctgtgaaggtgcgcgttcccttgacttgagcaatcatgaagccaggtgcgatgaggatctccttctcgttctcatagttagcatcagccccgactgccaatgcgcgcaccgtgtcatctgaaatgacaattttgcagatggttgccttgccatctgtaaggtgctttttagcatcacggcggcacctgtcgagcggcacctctcgcatcatggcggcacctgtcgagtcaagtcgagtcacatcacatggtgacctctcgcatcatggcggaaactgtcgagtcacatcacatggtgacctctcgcatcatggcggaaactgtcgagtcgagtcgagttgagtcacatcacatcacatcacatcacatcacatggcgaccgacctctcgcattacatgacctgtgtcgagtcgaggcaaagataacaaacaacacttggatgagaaccgtctcacattaacatataacaagcggcggagcccctttcacctccccacagcggagcgactgggggcgaccggaggggagcccccacaaagggtccgcgaggaaccgagcgggtgggcgaccggaggggagcccacagttcacatcaagcttggaagaagcgagatcgtcagcggtatcggaggacacaagcaaacggcggaaaactgtcgaatgtatcggaggacacaagcaaacggcggaaaactgtcgaatgtatcggagatgcggaacactgtcgaatgtatcggagatgcggaacactgtcaaatgtatcggagatgcggaacactgtcgaatgtcgtgtgtcatgtaaggatgcgggggggcggagggcctgaaggccacaacaacgtttacactcgtgtttcgaccactctcatcaaggacggcggcatctgtcgaggcgaggcgaggagaggcgagtcacatcacatggcgaccgacctctcgcattacatcacggcggaaactgtcgagtcgagtcacagagcgagcgacctctcgcatcagttcatctgtaggatcatcgtctcacacggtaatttctccattcattcattcattcattcattatcgtgcccagggtcggctgagtcagcttcctcgtcggatacctctgaaaccacctccagctgacgcgtcccgtcgcccggcttgcgttcgaagacgtgcagcgtcgtcccgtgatccgtgcattcgttctggcaggcacagatcaccgccatgaacgcctggtagtcgacgcagtgggggtcgactcccacgaaggacagggtattcaagccgtcggtgaagatgcggctcgtgttgccgcaggacttgccacaggacttgccggggaacgcgtcgtcgatgccctcgtaccgcatgactcggtcccagagcagcgggtggtggaggacctcgggcgagaagccggacatccggttcgggtggatacggatgcggtagcgacggcccgggacgaggaccaccgacgtctccatgagaaaatccgaatatacatacagtagttacgacagggtctctttacacgaaatgggtagaggtgacgctggtgatgttgatgttgatggacacgcagggaaggactaagtacaaacatggtcaatggggcagagtaggaatatctcatggcacccatccctgtcagtaccagcccagatcgcggatccgcgaatggatcttaaacacgttggcttctgtcattattccacgcatgatcatggccaacgcagatgcttggaagctggctacatgcctggaagcagccgccaaagctcagctgcagcaggggggggggtgagacagacaggccatctgtatcatcttcgcacggacttctctctgcgctttcaccatgtgattgccgaggacacgaaaagcatggacaattcatttttacatgtaaatgatgcaattcttgcattctgagcatgtgtacatggattctgaaggacagcatttgatcactcttttctttgtaggttcgcattctccacagaatacgcgtaggtcagggtctactatttcgtattcatcgcctcccatgtattgctcgagacgcacacccatggctttcattgtgtattgaattctgcgggcctttttcagccatttggacattgcagagtgcggatgctttccgttaatccagtatggcatcaagtagtccactaacaattcttctccccgcttcactttccttgatgtgcataggtatacttcttccgtatcccccttcttcttctgtatgaattcgcagttgtttgagaatcccgtcacttccggatggatggcatcgtttgcgatatgtgccactcccttgctcagatcgaatgggtctggttggagcgtgagaacgtttggggtgcacgcgatctcaaatgcgtacgcatgtacacgtttacttttttgctttcccgatcgtgtacgcgaggacacattcgattcgttgatgacaggtcctgggtactctgtgagtggtgttccagtgggtagcgaacggatagcaaagaggcccctccctgctccgggtattttggatttactgatgcgtatataggatggtatctttcctgtatcgctgaatgctacacgctcaaatgaaaatgggcgaacgtgttctcgcatgttgttacagttgttctcactgaatgatctattattccatttacaccataaactttgtaatgtacagttattctcaaataaagtgggacacacccactacagtcggcggaacagtaaaatgaaacatatatcagatggaaataaatgtacgacatcgccgttagaaaaatggcgttaagaatggtcgctgacttgggtgtgttaaaaatttctgtgtttacgaacatcagtcgttctactctgtggaggtggaaacgctttggtgtaaatcgaaaacgacgtgaatttgtaagcaacctttttgagacgaataaggatttgttaaaatcgtttttattgtcaatagttttgatgatgacccaataaggaagactgccattctgcaacactccaagtacatgttggtatgttctttgaaagtgacagtcaacaagattcctcaaaacatatttgtagtgaaccacggccctgtatctggtttcaggggatatcattcaaattatactgagtgcagggccttgtgggggcggctgccaacagcatgaagtgatgttaatttattcaacatacttgacgatggtgttgtcgtcccgctttgcagatggacctgcctgacatgacctacagcgggcgcaacattacggacgctttgctgcctgtcgcagctgcccgaaggacccgctcttgtgcacctgtactacacaccatggcagtacatgtgtgttttgaaaaagacgttcctgctcgggaagtgggcttcaagttttgcaattaaactggcagagtgtggggcagtgacagatatccctaattggtggagtactgacatgaaaacggttgcgcatacctgtcaggaaccatgtacacaataagatgcggtggtccctgtcaaagaattgagtgcgagtcacatggcgaccgacctctcgcatcacggcggcacctgtcgagtcgagtcacagagcgaccgacctcacgcgtttcgccgagacgcgccgagaagttcctcgaaaccccccccccccctgatactgatatgagtgaacacggccgaagagttcgtataagaagatctttcttacaaacaagacaggtacagtcagagacagaatttatggaggattttgaaaggagagtacgtgtgtggcacgaaaacattcggatcttcgaggatcatgtccctcctcgtgcttctttgaaagtttcttacgatccttccttcgagtttgatcgcacgaaatatggtacgatgcggaccgatatccgtgtcatacagctagagacatttgatattgggacaccttatatttggggattctgaaaagttgaccaattcaagatttgtaaccgatcttgtcaatacagatactgtcttcaggtgattgacacaaaaaattcaaggcatctaatctagtgaacaaccgcgcggtgtcttatctctgcatcaatcatgataacgtatgaaatggtataaagaaatgtgggtacaatattatatcaccaaaagaaaaagaatactcaccccctcttaatgggggtagtgcaagacaaaggagatgacgatattaacatcagcgtcgtcaagaagacgcttaattctctgtgcatggatgtatcgaggcatcagatctcctcaaggatacaaagcatggtactcttaatcaattacgcagttgcagaggcatacttattcgcaaactttcatatcacaagatgcctcgatgatggagactttgacgtcaagcagttgccacacctggatcggaacttttattacaggtgcctccttgcggtatcgacctccaatgttcgaaaggatactctgggccagagcttcaatgataccatggttgctttcgacgccctaagacctgcaggatacgtgaaggtggacgttcgtccttggggacaagtaatcgcagacgtctcaatacaaatggcgacgatggcgtgcaacagcgtctgggcaaacgtggacagggtcgttatcaagtacctgcgcttgaaacatccctctctgaagaaacatttcaagaagattgtcaaagcggtggtccagtacccagaatcgaaaatcgacacaatcatcccagagggcctcgtgcatgcgatccacatcaaagaggttgtcagtcacttgagggctctctttccgctgccaagagggaagcagttcaacactagagcgcacctgacaatgcgattgttccatcacgtgcttacagagttgggagaggtcggacgagtggatccgaaagataaaaaaacaagaaaaagtcacccccgtctgttcagtatccttcctcgcaagaacggcttcacgatttcgtacgtcccgatatcttccatgactttcatgaagcttctcagcatgggtgattcgccactcgagagcgtctctggcgatggacgttacgagaaccatacaatgctgtggcgaaagtactttaatgtccaaggtcttgagacgaaaaggtctcgctttgacaaccgaatcctcagcgacggttaaggggtatccgtccaaatgaagcagaagggtaaagaagaggtcgttgaagaaggagaaaacgcaggctatccaaaggacgtaaatatcgtagagtgcaaggacgcagtgggtgcgctgcgtgtcggagtagaccctggaatgacagatatcgtcacggtagcatcttctgcaggtcgcatcgagtctttcagctcggctcgctttagcgaagttgctgggtacaatacaagcaagcgtcgcacctacaaatggaatgacgagactcaagacctcgtgaagtccattccatcgcctaatacgagcaacatgtccgacctgcaggaccatgtcagagcttatctcaaagcgctcccgatcctcctacaacacagagccaacaaaggctaccgatctatgcgattctttcgatacgttggtaaacagaagacgattgaaaaggtatgcgatgtgattgcaccaagggcacagacgaccgttgttggcttcggcaactggtccaaccaagggtatggtatcagtcgttcatgttctgggcccatcaaagagatcaggaggtgcctctcacgtcgtaagaatgttttgttcaaaaacgtcgacgaacgcaacacttcttgtaaatgtcacggctgcttccagaggcttgtcaacatgaaggcagacagtgtagtctggcgcggagtttgcaaagagtccccaatcgacgggtctataactgttgagaagcagaagatggtggtgaagaacgtcaaggtccacaaagtactgcactgtagagacagtgtcaaaagcgcatcatccaatgtgcgctgtggtgcaacctggaaccgagacgtgaacgctgccaagaaccttcttctccttctgacaacgtggatgggcgggagagagcgacctgaggcattctgtgttccctcgcctccccccaaaaccacagtttccatcgaggcgagcgtgagcgctaaaccgaccgacccacctgggtttgtcagcagcttgccttgttatcctttgggccagcttaaatgctgaaatacagagatgaagggcaaaaatatgtactcgccttaagctgatctaatgggcgttcctgcttccgaacggattttttattttactgaaatcttacgataaatattgtaagatcgttttcgcaaattaattggttttgcttttttgtgtattttacgaaaatatcttacaatttattttgtaagatcgttttcgcaaattgattgattttgcttttttggtgtattttacgaaaatatcttacaatttattatgtaagattgttttgttgcattccggagaaagagactattcccttcaatttcaattgtaacattgatttgctcgtttggagagagagaaagttccttcgaagtattccaatacataatcaattgtagaggacagtcaagaggaaggtgaaagctgtttacaaagtcttgaacgcattgctcataattatttatctcacaactcacaactcaacagttcgaaagtacaacttagtacttatgacaggctatcacgttgtagaaagagggccaatgctaacttgttgggtaacaacagcgcctgtacaatcgctgcactagaatctcctcctccatgcccccatccccatcttcctcctcctccatctccttctccttagcaatgtctacattgtctccatccgattgcacagcctctgccttggtgtccttctcaatggattggcagcttgacccctttgcatgactccttgctgtgcattgattgccatgcccagcaccttctctggcagcttgacccctttgcatgaccccttgatgcgcattgattgaccccccttgccgggcccccccttgctgcgcatgcatgaaagactgttttgataagtcggtaaggctttgcttcatgccttgcgctttcacctcttttcatgccttgcgctttcacctcctttcatgccttgcgcaaattgcctttcgcatcctgcattgctttgctgcgcatccgcattagcaccgggtggccctgcatggtcccgagttgcacctaattctcgcaccttttgcgcaatgcatttcactgctatgggaattcacttcagctctgttctcatgatctgctgctttgcctttcgctttctgcatcgccttgctgcgcatctgcattagcaccgggtggttgtgaataacccccgagttgcttctaattctcgcaccctttgcgcaatgcatttcactgtcactgtcctgcctagcaccttctctggtggatgctgggcagatagccaggagcactggcgctcggagcactggataggtctgcctacctgcatggcggttacccgcctgcacctgccagaccagaccaggacacgcgccgggccagcacctgcgccggagtactggcgaacagctctgcacccgcttgcaccttcctgaggcctgcctacctgcatgatggttacccgcttgcacctgcgtcagagtaatggcggacagtactgcatacccatatggcatgcatcctcagctaccgttccaagatttccatagcgtctggtttggttatgaattgcattgtagtggtagactgcaattgtagcccagacttagctgccttgtgcctgtgttgaccaagttactgcttgccaacaggttgccttgtttattggttaatctttgccgggagtgtggttgggtgtttatgttgtgattggtactttacatgacactgacatatggatcatgtacacctgcagttcttctattttactgtgttcttgcccacctcggccacctacctatttactaggtttgttttagtggcccagtactgcaataggtaaagcaaagatgtgtagttggggcctgcttgacttgcatagcatgactgatgaaatgtcacagcccagaagaatttagcccttgtgcctgttccgtctaggcattcggtggatcaagttttctttgacaggttttaggattgatttttttatgatcgggaggactgtgtgtattccgagtttggttttctcaatcattcgcgcgttgggtttgacaatgctcccgattatgatcgggaggactgtgggtattctgagtttggtttatctcaatcattcgctcgttgggtttgacaatgctcccgattatgatcaagaggactgtgggtattctgagtttgatttttgtcaatcattcgttcgttgggtttgacaatgatcccgattatgatagggaggactatgggtatgccgagtacaaaaaaaaaaaaaaaaaaaaaaaatgccgagtacatgttttcttaatcatttgctcgttaggtttgtcagtgctcccgattatgatcgggaggactgtgtgtattccgaatttagttttctcaatcattcgctcgttgggtttgacaatgctcccgattatgatcgggaggactctgtgtattccgaatttggttttctcaatcattcgctcgtggggtttgtcagtgctcccgattatgatcgggaggactgtgggtattccgagtttggtttttctcaatcattcgttcgttgggtttgacaatgctcccgattacgatagggaagactttgggtatgccgagtcaaaaaaaaaaaaaaaaaaaaaatgccgagtacatgttttctgaatcattcgctcgttaggtttgtgagtgctcctgattatgatcgggaggactgtgtgtattccgaatttggttttctcaatcattcgctcgttgggtttgacaatgctcccgaatatgatcgggaggactctgtgtattccgaatttggttttctcaatcattcgctcgtggggtttgtcagtgctcccgattatgatcaggaggactctgtgtattccgaatttggttttctcaatcattcgctcgttgggtttgtcaatgctcccaattatgatcgggaggactctgtgtattccgaatttggttttgtcaatcattcgctcgttgggtttgtcaatgctctcgattatgatcgggaggactgtgggtattctgagtttggtttttctcaatcattcgttcgttgggtttgtcaatgctcccgattatgatagggaggactatgggtatgccgagtcaaaaaaaaaaaaaaaaatgccgagtacatgttttctgaatcattcgctcgttaggtttgtaagtgctcccgattatgatcgggaggactgtgtattccgaatttggttttctcaatcattcgctcgttgggtttgacaatgctcccgattatgatcaggaggactctgtgtattccgaatttggttttctcaatcattcgctcgttgggtttgtcaatgctcccaattatgatcgggaggactctgtgtattccgaatttggttttgtcaatcattcgctcgttgggtttgtcaatgctctcgattatgatcgggaggactgtgggtattctgagtttggtttttctcaatcattcgttcgttgggtttgtcaatgctcccgattatgatagggaggactatgggtatgccgagtcaaaaaaaaaaaaaaaaaaatgccgagtacatgttttctgaatcattcgctcgttaggtttgtaagtgctcccgattatgatcgggaggactgtgtattccgaatttggttttctcaatcattcgctcgttgggtttgacaatgctcccgattatgatcgggaggactctgtgtattccgaatttggttttctcaatcattcgctcgttgggttgtcaatgttcccgattatgatcgggaggactgtggttattctgagtttggtttttctcaatcattcgctcgttaggaatgacaatgctcccgattatgagagggaggactatgggtatgccgagtacaaaaaaaaaaaaaaaaatgccgagtacatgttttctgaatcattcgctcgttgggtttgtcagtgctcccgattatgatcgggaggacagtgtatattccgaatttggttttctcaatcatttgctcgttgggtttgataatgctcccgattatgatcgggaggactatgggtatgccgagtaaaaaaaaaaaaaaaaaaaaaaaaaatgccgtttatatgttttctgaatcattcgctcgttgggtttgacaatgctcccgattatgatcgggaggactgtggatattctgagtttgtttattctcaatcattcgttcgttgggtctgacaatgctcccgattatgatcgggaggactatgggtatgccgagcacatgttttctgaatcattcgctcgatgggtttgtcagtgctcccgattatgatcgggaggactgtgtgtattccgagttttgttttctcaatcgttcgctcgttgggtttgtcaatgctcccgattatgatcgggaggactgtgtgtattccgaatttggttttctcaatcatttgctcgttgggtttgataatgctcctgattatgatcgggaggactatgggtatgccgagtacaaaaaaaaaaaaaaaaaaaaaaaatgccgtttatatgttttctgaatcattcgctcgttgggtttgacaatgctcccgattatgatcgggaggactgtgggtattctgagtttggttattctcaatcattcgttcgttgggtctgacaatcctcccgattatgatcgggaggactatgggtatgccgagtaaaaaaaaaaaaaaaaaaaggccgagtacatgttttctgaatcattcgcacgttgggtttgtcagtgctcccgattatgatcgggaggactgtgtgtattccgaatttggttttctcaatcattcgctcgttgggtttgacaatgctcccgattatgatcgggaggactatgggtatgccgagcacatgttttctgaatcattcgctcgatgggtttgtcagtgctccgattatgatcgggaagactgtgtgtattccaggttttgttttctcaatcattcgctagttgggtttgacaatgctcccgattatgatcgggaggactctgtgtattccgaatttggttttctcaatcatttgctcgttgggtttgacaatgctcccgattatgatcgggaggactatgggtattctgagtttggtttttctctatatctgaatctgattttgaatctgaatctgaatctcaatcatttgctttaccaacctatttgtcttccgcagggtctacaatgacagtacagtggaagttaaactccaatcggacgggaaggatttgggattgagaaatcaatggccaagcgcttgatagcagcattggatgacttgtccatggatgtgtcagaccttttacctgcaagtaacgagattgccaagactatgaaggttgcacacactttggagactaatatggaaaggccagaggaggaggatgtgttgtacttatattcttcacaagggacgaagccggatagaagaatagcctacgagcccactactgatttggttgttggtcatgtcgctgtggtcaaggtacaaatggatgactctagcggattgagaggatgggacgtggtggaggtcaaatcactaccagtgaatggagaagtggaatgtgtgtatttaaagcccttgtactttgggggtcagaagttggtgtacactgaaacacaatacccaacttggccagaagattggatggaccacaagcttgtgcctattaccgtgggggttaggagaaaagcaacatggacgggcgatattcccattgacgcatttcaatttagctgcgaacccaccaagggtatgaagatccagagaaagtaccacgcaagcatgctcctagcttgtcaatccattgagaaggacaccagggcagagactgtgcaatcggatggagacaatgcagacattgctgaggaggaggagatggaggaggaggaagatggggatggggacatggaggaggagaaggaggaggaagaggaggacgaggaggggggggaggaggaggagtaagatgtttgacacatagccgttttttactaaattagaaaaattaaatgaattatacttatgatttttattgtaagatgtaaaagctgaattctgcctgccgccttataaccgtccgctttccctttatttcttacaattataattggaagacacgaattgatgttaacacctttttttacaaaatatggcatttcaatgttgtaacattcgcaatctgtacgtttctccgtctttcaagctcatttcaagcatattttgtcaaaattgactacaatcttacgttttttatcgtaagattgcatttgaaaagcatcaaaagaccccccaaaagtgattgtaagattggaaatccgttcggaagcaggaacgcccattatctacccattgggttcaagggtcaccggtagggtgtcccacaaattgcgtctccgactgtagacatggacacattagatgcgaccacattagatgcgaccctagctcttatagagcaaggtatgcacccgcttgtcttgaacatggcggacatacataatcctggggggtgcgtgtcttgtggaggtgggatgcaggaagagtcgttgttccggaggacgaactaccatcgtcatctctcgaggtcgttttacccgatcggagaaagggaagccgttgtatcgttcgacgtcgacatcatcagggagtgcgagagagacggattcgagttcctgaagttttctaaatcggcatccttcttggcatgtccgtgcatttccatgccacagctggtggacaacaggttctcagagaaagacagtcaattgtttcgcgaaaaggtgagactcgtattgagtgtagctcacaagtacggacatgacagcatcgtattaggagcttggggatgcggggcgttcgggtgtccacctaaacacgttgccgagatcatgtttgccgagatcgaaaaggtagaagggtgcttcaagaagatcgttttcgcgattctaggtaaaaacatcgatttctttcatctcgcagaaaatgaaaaaaagagatcactacagtaactgtccggcctcacttcgttggttcacaatttatgcacactcaactcaatgaacaatttatgagttttcaattgaacatgaggacaacaacgccagaaataatggcactgcctagatcaaattccatggcatgccttgggtcacagtgccgttttcttgtcgtctcaccgcgactaagagcgtttcatgcaagcagtcctcgtcacgtaatcgatagcaacatgcatcctggcatccatcaagaactgttggcccaggagacacacatgctcgcatctggtcttggggcacaatcccacctgtgtggaaataccgctgatgcacacctcatacatgtgctccgagtgagggagcttcggatctggaggataaactgcattcttgtaccccaaggcgtgtaatacctccagcgtcatgtagctgagtgtagagcccgtgtcatacatcatggaaatcttgaactggtgcaatggctcagcagcctcacacataatgggatccgccttgacaattacgggaaacaaaatgcggttcaaccccccgtaaaaccgaccagatgacattgcgtcatggggaaccagctcatcagtaactgacaggtagtgcaaattaaacagtgttttgctggcagagtaaactaccgatcgctcacagaacacggagcacatcacatcgtccatggcagcctggtatgggtttctggacaccgtcgccctccctggcatctcgaagtcttcatacacttccataatttcaagctcccttaccagctctgtcaggggaattattacgccgtcgagacgcgacaggccaaggtgcttatccggtaccaaactccggcatgccagaaggctgtcaagtgctgcgcccaacacgctgtctggcagagtgtcatacagtgccggagggaccagatcttgaacgttgtgcaggttttctaggatgcttgtaggggcacggacgtccctcatgcggtccaatgttgacatttgttagcatgaattgcgttgctctcacgcgttttatgacttggtgactacttctgtactcccttagaactatcggccctgacagcttcccgtagtgacagtttcccttagcctgagtcattgagtgactcagtgacaggttcctgtcagctacttcaccggtcttgcctttaccttgatagtttcccggctgcccggtttcctctaacattgactgtatagtgtctaacccttatgagggtatagcctacctttctttcttcctccactggtgccccttaatgggtctcctgtgcttgtaacttactctcgtctctgcatatatagattggcgtgctgcacacacaaagtccactcatccggagtgttatcaaagctaataggttatccggcccctcatttctaccactgctttgaaatgcaacttccgcgaggacccccggcgacatttgagaaactccatgacaagaatggagaatcctggtcgcgcgggatgcgcagcgttattataagtaatggctgcgaccgtgtccttcccaaggaggacgcggtttctcaagacgattggctagacgtctgtgcaccagcgacctctgctggcggttatgagagtccttccgccatcatggaagtaacccccccccaatcatacctctacctttgcgctccttcagctaccgtctgtcgtagacgactttgacgtgcagactcaagtcggcgactagcctggacatcggtggagataccccgtcttcgtctgctcgcgtccttgatgtcgctaactccggtgtttgaggctctgcctgcataccggaggttgccaagccgaccaagctccctgctgatgtctacgtcgtctttgccccccccccctttgcactctagtggctatgtgctaccttctggagaattttttcgatcaagctggcggatcgccggcactgccgtagggttcgccacaggaggacgacctacgcgtctggacctggagattcttgag

SEQ ID NO: 310 - DNA, 20957 bp, Chlamydomonas sp.
  source 1..20957: mol_type = other DNA
gtgacaattcgtcgtatgatcgtgacagctgtggatcgcggtggacgcgtcttcagtcaagatatccgcagccaggaaattgactaagttagttaacttaattaactcacgtaacttgattaactgaaggtggaactttggaaaaacactggaggtaccgagtctaccgttgacagattagcaactaaaaaactattgttttaataaaaacgagtgtaaacaactttgatccatacaggtctcggcattgttttgctgagtatgtaacgttccccccgttcccccagatggatgtaacgttccgttttcagaggtgttcatgtaaacacgtttaaaatagggattgatgtgagcctccggcattcttcagtatttattttttgttgaaataattgttgttccagagatggagagtcttttcagaggtgttcatgtgaacacgttttaaaatagggattgatgtgagcctccggcattcttcagtatttattttttgttgaaataattgttgttcccgagatggagagtcttttcagaggtgttcatgtgaacacgttaaaaatagggattgatgtgagcctccggcattcttcagtatttattttttgttgaaataattgttgttcccgagatggagagtcttttcagaggtgttcatgtgaacacgttaaaaatagggattgatgtgagcctccggcatttttcagtatttatttttgttgaaataattgttgttcccgagatggagagtcttttcagaggtgttcatgtgaacacgtttaaaatagggattgatgtgagcctccggcattcttcagtatttatttttgttgaaataattgttgttccagagatggagagtcttttcagaggtgttcatgtgaacacgtttaaaacagggattgatgtgagcctccggcattcttcagtatttattttttgttgaaataattgttgttcccgagatggagagtcttttcagaggtgttcatgtgaacacgtttaaaatagggattgatgtgagcctccggcattcttcagtatttatttttgttgaaataattgttgttccagagatggagagtcttttcagaggtgttcatgtgaacacgtttaaaatagggattgatgtgagcctccggcattcttcatacaatttttcggtcaatcaaatgattccatggcgacccgatgtgtttggccgagcattgcccagccctagcgatcgatgcctgcaccgcgagcgagctaggggggaggttgctgtgacccccttgtggaagaacacatgtatgacaactacaatgtaacaaacataagggggttctctcctcatggagaaatgcaccatggagaaatgcgccatggagaaaaaaacacccccctcctgtttgttcgcgtgcgagttgtgtgacaagcagttcagtaaccggtattcgaagtcttcacacaagcggaggtctcaccccaagggagctgttgatgttgacttcatggagaagcgcatggagtacctcgagaatcggatcgatgaaatgcaagcggaactggaggcgttgcggaaaaaacacactttcacaatcaacaacagcttcgggtcggccaccaacaactatgtcgttacatgcgaaaatttcaccaacaccaccaccaccaacaacaacaacaatactgctccagatgcggcggcgctatctccagctgcgacgacaccggtggaggacatgcaccccttcggggaggaggtcacgcccgagtcagagttcctctcggtcgctcaattcaatgagtgcgggtacaacctggtcaagctgctgcagctatcgcacttcaaccccgcgcacccgcagtacatgaacatcatcatggaccccgactgctaccagcagacgtacgtgtacggacgggactgccgctgggcgaaggcggacctgcaagactcgctgctgccggtgctcaggagcatcgtgcagcgaatgagcagggtgaacccggcagaagcaagcaagtacgaggacgacgccgccttcctccagggaggcgccggctccgtcaccttcagagccatgcagggcatggccctgcacagccggacctgcgtcagggtcctctcggagaggggcgtgccgctgccagaggaactacggacgcacttgcacttgacagaacacaatagataaaaaactgtgcgggccccccgttcgtccattcattctcacacgggccacggcggctttcgaagagtagtatccgtacattcattcattcattcattctcacacacacgccacggcagctttcgcagcctcgtccattcagtctcacgaccgcatgtgctttatctgtgtgtgtgtgcgtgcgtgcagcaatggataacagagctcaatccaatacaggccacatcttctcacgcatgtcattgatgacatccgtaatgcagaaagagtaaacagcacccgtgttgcagcgtcgcttggagacgcccctcaagccaagcttggacatcttgagaccaaacttgatcaaggtggtttcatgtttaggagaaccagggatcggggatagccagtcattgaacatggagaacaaggtggccgccgtgaagctcacagaatcatcgatacggggatgcgagacgctctgctctagcatcaggtgcaagaggaattgggactcaatcagcaggatgtcttcgggggtagctttttgcagggtgtacctcgtgtccaggccgcactcctggacgacctgcaccagctcgacaacgtcagcaacagtcgcctgtagcccctcctcctcgcagaacgtgacgtaagcgttgtacatgcccggggtcgtggcgatatgcggtcgcagatcgccggggttggtggcaatgcaccgctcatccagaaagcggaggatattcttgtggcgagtgaagtcggggaatcgcagggcacgacggggaagcagcaggccgtcgaaaatgtgctggatgggttggatgcccagatccttgagcgatgataccactttcttggcggtgaagctcgacctgggtagcttcgacagtacccgagcgacaaatgcgccctgatccaacaccgcaccagacaactctgttgcattggcctcgacaaagtcgtgcaccgtatcgtaacactcgatgttagcctgaacgacgttgtcgaaaatcacagtcaccacacgtgagacgtacgtctcacgatccatacgctcctggtccgtctcctcagattcaacggcggattccacggatccctcagattcaacggagtcattacgtggagtgtcacactcctcctgtttgccaccgcagtcgtcgccataccaggcgtacttcaaaacgttcgctaacataccattgtaaacggtggcttcgcccacctcgaagtactcggcacccacatctcttcgtggctggattctggaatcgtaaccaccgcgcatgtacctgagcagtgtcgcctctgcatccacgcacgcttgtgcatctcgaacatggatggcaaaaatgagctgggatccattggggtactgcgagagcctcttgcagaacggctggctggtccggccgaccttgacgaccaacggggacaatttgcccaggaactctcgctcgacgagggcgtacacgacgtgctgggtgtggtgcgccatggatggatgatacacaagggaagggaaggcttgactcaaccaatatgcttgtcgcgagctttatatcgtgataatcgagcgtttttacgaggtccatgcgacatccaccatgtcacacatatgacaaggagtgacgagaatccgtgtgtcatgaatggggggatgcaaaagccgcaatggcatatgtgtgtgtgtgtgtgtgcgaatgaatgatggacggggtcgcaaatggtgatcacatgtcaagcagaggtctgctagacaatatatatcgtatatcgatagggaaatcgcgggccccacggagtggggtaggggaattgagctgcagaaaccaagtgtgtcaaggcatcaatcaatcatcacacgcaaaactgtggaaaactgtggaaaactgtcgcatccacaccgtccgtccgtccgtccatccattcatgacacacggtggcggatcatcgcaactcatcgtctcgtggaagtggtgtaaacgcgcgcattgggatagcataggagcagctcgacagcaatcatggcgcacatgacaaccaatgtcgtgtacgcgttggttgagcacaagttcattcagaaagatgagatcgtcgtcaaggtgggcaggacgtcgaagcccgttgttcagcgactttctcagtacccgaagaactcaaagatgatcttcgcaatccacgtacttaatccgcgtgcttgtgtggaggctgagactgtcctgctccggtaccttcgcggagaccctcgagtcaagccccgtcgcgacgttggatacgagtactaccaacttgacgcgggtgatgcaggtgccgtcttttgggagatggccgttgtcgtcttccagtacgtgtggacaggtggcgtagacagccttggttgcggcaccgaggacgtgcagccagacccccccagctttgccgttgttgagcgagagaaggaacgcgagaatgagcgagagaaggaatatctattctgtgccctgagctgcttctattcttagccctgagctgcagcgccccttttgtggcgtgccgttgcaccccgatcttcagaagatcggggtgatagaggagacgctctctgctctgggttttgtgtccccattcgacactacgaccatcatcccaaatctgatgacggtgttcgacgccaagcgcaagggaacacagatgttccgcgactacaacaacaccgctaggctgttcagccaggcctcgtgcggcgttcgcgacgggtgggacctgcgcaaggtgtccaaggctgtgaagatgatcctgcacgcgcttggtctcgctcaccatgtcgataccacgcgcgcgcaggtcaagggcaagcgtaccaaggaggagaggaactaccgcatgtgcccggagagtgtctcccggatgctggagctcttgaaacttcgtcttctgcgcacggacctcacgcagccgccgccgccgctgccctttcgggtcacgagctgtccatgtacagccatagtccatcggcaaacaacggattgtattattcaacaagcggcggagcccctttcacctcttccccccagcggagcgaccgggggcgaccggaggggagcccccacaaaggattccgcgaggaaccgagcgggtgggcgaccggaggggagcccacagttcacatcaagcattagacatacacactactgtgtaactaactgtcaagtcttacacaatgtgtatgttgtttgtaaaagattcactgtaacacttgggtttattagcactgtaacacttgagcttctttctcgctagaacgcttgggcgtttcctatgtgccgtctcaagcagacttctgcttgacaactatgtcgggagtatgaaagaggaatcgcgggacacacggcggcacctgtcgagtcgagtcgagtcccatcacatggcgaatcagaatccccaaaatagaaggtgtcccaatatcaaatgtccctatctgtatgaaggtccgatgagcaaactccagtgttgccaagttgctgcagctctgcaattgtcaggttgcatttcatgcatcggtatggttgtaattctgccatttctagcagaccacatttccaaatgtgtttgcccctattgcggtttagaaggtcttcgctgagtttgaactcgggatgttgcattcttgtcctcccacgcgggtgttgcattctggggatttagttgtagagattcttatattctttatcaattccaaaataatggcattcttgttctcagtagggaatatttaaaaaatgatccggatgtcagggtcaagcaggaacagaaacaatgcactcgatcaatgcgtgtgtccatcgacagagtgtatgttgacctcagcatcaggcagttcgccgtcccaacaggagcagttctgcgcttgtatctgtcatgaggtccttggccagctcccaccagggactctggtagcaccacagcccggtgcccagatgcacggaccggcccggaaccctccagtggttggcgtcccccatgaaattcatgtaccgctggtgcatcgcgccacctgccgcccattccgcgcactggcacaggaaccggtgacattcgtacagctcctccgcgctgctcatgctcatccccgcgttgatgccgagcactatgaactgctccgcaggccgcagcgcatgctgtcgctgcaagaatgttgtcaggtccttgaatgaaaacaacaacgctggtcggggctgctgatcactcagcccgtccgcatagcacttcacattctgtaacgatcgcgtggtaaagcatgtgtccagaaaagccttttctagtagcttgaagctacctgttgccgccgcaccccgtcagtgcataaacacccgcccacattccccatagcgtgcagcagcgccacctcgttctctgcgctcccagcccctatgaacgctatacatgacaccgccttgccgggcactagcgcacccctaacctcgctcgccaccgcatcccagtctagtgcaggacagctcacctcgcgctgaccctccgacggcactagcactttgttctcccactgcattcttccgatacattatctcattcagctcccccttaagctcttttgacctgaatcttgaattggtcaacttttcagaatccccaaaatataaggtgtcccaatatcaaatgtccctagctctatggaagcttcgagagcagaccaactacgacttggcttgcgagtttcgcacagttcactcgcgattctgagaccggagatcgcggaaacacattcaataggtgagtttgcatcggaaacgcttcttgaatcgttcaattatgacaccaacaaagaaagttaggggatctcaaagtttgtttggtgtgactttctttccatttgctgcgcagacattctcattcatatgcacgcatccccctcacgcaacaaaatcgaggacaagaacgcatcttcgtgaaccaaggtgagtcttgacattgcgagatcggaaagcgctagtcatgatgagatagatgtacctgttgaggggtctgaggacgtatggaagagggggatgcatagggatttcattttagcggtttaataattgtttcaaatgtttcatgacccactctcctgactcttcagctacgcttactacaaaactaaacagcaatctggtccagaacgacgaacatcttcctaatcttcgtcggcacatactgagcgacgatggtaggagatgctgcgcgtagcgcattcgcgtctggctccccccctaccatacttattatgttctctatcacgttaggtggaattgatgagaatagggttgggtccaactgtctggcaagacatgtgctttcgtttgggcagaagcggatcacggaatcgcccacaacagcgtcggatgcaatgaggcgggttagtctcctttctaatacattccactccacataaatctcaacaatgcatgccccccgtctaggtccatccttattgttctcccatgctcgcatgtgctccaacagtgtcagtctcctcataagcgcacagacgagtccgttaagattgcatttgcggatatgaatattttcatgccacacttcttgagggtctaagggtatgctatcgtccttgacgtacgcctcgaacgcattgcgttgtagaaaaaaaacctgcaaacggtcagaaaatccaaacaattgacgcacactggcataccttgcacattgcactccaatgttcaacggtttaaaacccaccttgaaaggcatacttgattatatatgcacagctttttactccttatgttgagcagtcagtaccaacaactgtatgggatcgactcttggcgaagacttcgagaatagtcggcttctgttcgacatgttgacattcgggggagagtgaatgccgtaaggtgtgccgtacacgaggcgttttcattttagtattccgtcgactgtatcttgcgcttattctggacaacaagtggaaagctatactttataaacaatcaatcaatatgattgacaagtgtttttctctactcatacctatctgcatcgctaccttcgcttttatttacatagctcgactggagattgagcttgagactgagcgcgctcgaaataaggcagatactgctcgactgaagattgagcttgagcttgagcttgagactgggcactctctaaagaaggcagatgcttctcgagtgaatagtctggagattgagcttgagactgagcgcgctcgaaataaggcatatgttgctagactgaagattgagactgagcgcgcagaagcacttgagaagcaaatgaggtacgaactgtcaagcatgactgccgagcaatggaattccctgaacgatcatgacaggcgtctcaatgaggatctttgcaaacaatacggaatccccttacccaacatccaggagtcattcctcgaatccgcgattcatctttcatgaactgccgtctcaagcaggcgtctgcttaacaaactattccgggatcatgaaagaggaatcgcgggacccacggagtggggcaggggaattcagatgcggactcgcggaaacacgtgtcatacagctagggacatttgatattgggacaccttatattttggggattctgaaaagttgaccaattcaagatttgtaaccgatcttgtcaatacagatactgtcttcaggtgattgacacaaaaaattcaaggcatctaaagacactgaatttacatgttcaaagtaccctgaaaagtcaaactgatggctaacatcgtgcgcatcaataatccttttcaaagcgttactttaatcaaatatatctgctacatctggaattattgggcacatgcagcgatattttcgcttgagcaaactaaagacattctcaatagcgttaaactctggactgtaaggaggtacaaagagtggtcgtattcctacagaatcgaacatagaaatcgtctcctttgaatgatggaactggatattgtaaaggacagcgactgtaccccgctgtacatgtaactcagatacaaactgtacaaagtcgactttcttgcaattgtgatcaaggatcttgtaatgaacgatacctttagcagaaacggcagcaattagtgtcaatttggacattcgcaatgtaatgggcgttcctgcctcccggccgattttgactggttgcgaaacatggtatggagcggatttgtgattccttggtgcttatgtcacaagctagcgagtcgttcaagaggctctaaatcctgattagaaattttaaaaaatcggccgggaggcaggaacgcccattatgtcctagaaatttggatatttaaacgtttgccgcgttgacagtaccctctgcgacaagtgtcaccaatgtaaaaacccgcctcatcgatgcttaacaaatccgatgtcggaacggctaaatactccttacaaaaacggtcgacagaagatttgtagtcagtcttgtgccgaactgttttgtatgcgcgcttgcgggtgtaaccaagtttgcgtgtgtagcgtccacaagtttttggagacatcttgacagaggacagagaagtcacaccctttgcaagctgagacattgtaaagaagggattggagtcaatcagttgttttatagcagccttgatatcttctgtaatgacactcacccttttcttccgatgatgttttatattggctttggtgacccaacgttggagtgatgattttgatactttgtacagaaaactaactttcctcaaactacgattatagtatttgtagtgaacaaccgcgcggtgtcttatctctgcatcaatcatgataacgtaggaaatggtataaggaaatgtgggtgcaatattatatcaccaaaagaaaaagaatactcaccccctcttaatgggggtagtgcaagacaaaggagatgacgatattaacatcagcgtcgtcaagaagacgcttaattctctgtgcatggatgtatcgaggcatcagatctcctcaaggatacaaagcatggtactcttaatcaaccacgcagttgcagaggcatacttattcgcaaactttcatatcacaagatgcctcgatgatggagactttgacgtcaagcagttgccacacctggattggaacttttattacaggtgcctccttgcggtatcgacctccaatgttcgaaaggatactctgggccagagcttcaatgatactatggttgctttcgacgccctaagacctgcaggatacgtgaaggtggacgttcgtccttggggacaagtaatcgcagacgtctcaatacaaatggcgacgatggcgtgcaacagcgtctgggcaaacgtggacggggtcgttatcaagtacctgcgcttgaaacatccctctctgaagaaacatttcaagaagattgtcaaagcggtggtccagtacccagaatcgaaaatcgacacaatcatcccagagggcctcgtgcatgcgatccacatcaaagaggttgtcagtcacttgagggctctctttccgctgccaagagggaagcagttcaacactagagcgcacctgacaatgcgattgttccatcacgtgcttacagagttgggagaggtcggacgagtggatccgaaagataaaaaaacaagaaaaagtcacccccgtctgttcagtatccttcctcgcaagaacggcttcacaatttcgtacgtcccgatatcttccatgactttcatgaagcttctcagcatgggtgattcgccactcgagagtgtctctggcgatggacgttacgagaaccatacaaattgaatgctgtggcgaaagtactttaatgtccaaggtcttgagacgaaaaggtctcgctttgacaaccgaatcctcagcgacggtaaaggggtatccgtccaaatgaagcagaagggtaaagaagaggtcgttgaagaaggagaaaacgcaggctatccaaaggacgcaaatatcgtagagtgcaaggacgcagtgggtgcgctgcgtgtcggagtagaccctggaatgacagatatcgtcacggtagcatcttctgcaggtcgcatcgagtctttcagctcggctcgctttagcgaagttgctgggtacaatacaagcaagcgtcgcacctacaaatggaatgacgagactcaagacctcgtgaagtccattccattgcctaatacgagcaacatggtcgacctgcaggaccatgtcagagcttatctcaaagcgctcccgatcctcctacaacacagagccaacaaaggctaccgatctatgcgattctttcgatacgttggtaaacagaagacgattggaaaggtatgcgatatgattgcaccaagggcacagacgaccgttgttggcttcggcaactggtccaaccaagggtatggtatcagtcgttcatgttctgggcccatcaaagagatcaggaggtgcctctcacgtcgtaagaatgttttgttcaaaaacgtcgacgaacgcaacacttcttgtaaatgtcacggctgcttccagaggcttgtcaacatgaaggcagacagcgtagtctggcgcggagtttgcaaagagtccccaatcgacgggtctataactgttgagaagcagaagatggtggtgaagaacgtcaaggtccacaaagtactgcactgtagagacagtgtcaaaagcgcatcatccaatgtgcgctgtggtgcaacctggaaccgagacgtgaatgctgccaagaaccttcttctgcttctgacaacgtggatggacgggagagagcgacctgaggcattctgtgttccctcgcctccccccaaaaccacagtttccatcgaggcgagtgtgagcgctaaaccgaccgacccacctgggtttgtcagcagcttgccttgttatcctttgggccagcttaaatgctgaaatacagagatgaagggcaaaaatatgtactcgcctttagctgatctacccattgggttcaagggtcaccggtagggtgtcccacaaattgcgtctccgactgtaggatctgacttgtccatcggaggaggacacacgcaaacggcggatgtgtgtgagcgaatgaattatggacgggggggtgcgaaagccgtcgtgtgtcatgtaaggatgcgggggggggcggtctattttgtgagtgtggacgatacgtcattccgggtgttccatcatcatgcacttcagtgtgtgtgcgagtgaagggtctgagaagcgattgagcgtgtgtataagggagaggggaaatctataatggagaagcgtttataataattataataatactaattatgtgtgcccggactgcagaaatgccgccgttttccggtacgttcagctacaagaatgacaacttgtaccgcagactgatcggagatggcgtgcacatggtcatggagcgactggaccctaacattgccaagatccggtttgaggtccaacaccccgtggctgaggatacccaggctgaggcccctatcatctaccagccaattcagattccagagggggtcacattgatagtagcagactctgccatccctgctgcacgaattgggaatgatttttttatcgtcacctggataggcaactatctcgttctaagggggggtaatgtacttttcaggatcttcaatcagcaatcccaggagattcaattagctgagtaacagggggtgggggagagagtcatcgtacctttcctgcgtgctcatgcagcatgccatggaaccggatcgaccctggacatgcgggagtcgttgctgcatgcctggtcatggtcatgttctctacagtggccatcatcaggagtttctggtgtactcaggtgaatgtatataaggggggaatcgtgtgtttactgtactcagggtcaaaatatctgacgaaatgcgttggcgtctcccgcagtatgatgatgatgatgaagagccagatcatcatcaattttgccgccatgaacatgagctgccaacctactcgccctcttcagcatcccgcaacaaggcacttctgttgtatgtggattatacttatgttcctactgatcacattcagaggactttatgggtgcacaaccgtgaagcaggaaccatgttgggcaagaatgtggatgggttggatataccgggtcaccacaacacgtgggttagcttgttgcgcccgcttgactttcatgtcgatgcgatgcgggggcacttgaataaggcagagctgatggatctgttggatgatcacgtgacacactcacactatgactcggtgctcgtgatcgtcttgtgtggtcatggatcctccggccaactcgtcctgaccaacggggcgaaggtgtcactggaggaggtgtcacatgcgacaatgcatcacagaggaacagtgttgtctttcatgttgttttgcggtgcgcggccttccgagggcctcaacccactgagagggatcaagaacaactaccaatttcgacggtgcatgttcatctttgcaaccgatgacgctgtcttgaactcgcaaacactgaatgcatttgtgaaagcgatcggcagcatcatggataccggtgaatgttgttactctgggattgaggacgccattcgcaaccacatgcgtgtgttcaacggatccgccttgcatctggtgggggcgaacaacgagatgcgaggttctttgtttcgaccgtcatcagtcaaacagagagaggtgagcttggcttgtgcccctgcttctgcatgtgagacaccgggatgcactatagggtaaaacttacgcaaattcgtgtttcgtgcaggagctttttgcggagcgcttcttgttctctgccagtggcgcatcctgggcaccggcatcccacctgcaggcatgtgtcaaaaagtgcccggttaaaatctcgaatttagcgcaaccgccgcacaggtcaatgtcccaacaccgcacctgtgctccagcgcccgcactgcgtcgcgcacgtggttgatctgttgttgcatgtgcatgttggctgtgatgagctcagtgcgcgcatcattaatgtcgttcaactgttgctgcatgcgttgcatgatgcggagctcgaatgcaacgagctgctcttgggtgacgtagaagggtagttggttttgcaggggggccggctccatgttcatgtccctaaaggcgcagcagacaagaaaacgctatatataaacgtacagagacaaagtgctgacgcttgaatgcaatctcatgcatctcacctcaatgcatctcatctcaatgcatccacaaacaagtacggtccaatacagtatcaagcaagtagatagctctgcaagaagaactcatgagataactcaagtccatgcaagtcaaagcaatccaaagaatccatgcacgccggcggctcctcgtccagactcatcacgcacacgcacggaactgatgcggcggcggcttatcgcccagccccatcacgcacggcagaggcagcgtctcgtccatccttatcacacatcatgccacgcggcggcttgagaatgccacactggaaatcgatcgtcattgattgcagcataacaacaacacggcggactcttatcactgccagcacacctcacagacacttcttattattaattcgcggtatcggattggcaaaaaaggaaattacagcgtgtcccactttatttgagagtaggagcacatgatggcgtccgtgaagactcgtcgcgccttgttaatttttccaagttactacgtagacgggttgggacccgtgcttatgcacacattgcaagagtgtggtacgctgccaagggacttgaaggggtacagatgtggcggagccatgaaggaccatgatgtttttgtcaacaaggttttgggttctggtatggagatcagtgttctcgaaggcaccgtgtaccggaggaccgtcatgaaccaattggcttggttgttggagccctccgtggacgttgctcttttgttattctgtgggcatggcatgaatgaggggtcgccacgtcacggtacattggtatgttcttacaaacagctggtgtcagctgaggccatcgatgcggtggtgctgagagcagccgagggtggccacaccgaggtggtcagactcctcatggaagctccagcccaccctgcgcgagcggactaccagatggatggtgctctgctgagagcagccgagggtggccacaccgaggtggtcagactcctcctgtctgctccagtccaccctacacacgcagactgtctaggaggagctgctcttatggaagcagttagacgccagagggggcgtgctctggcgttggctagacagggtggacacgtagaagttgccaaacttctcttgagatttggtggttagagcacgattgatggctttgggagctgcctagaagctgcaatgcgcgcaggcctgatcacaccccctttgattgggggtgtttctgatacagtttgggtcacggagttgcctagaaactacttcagtttcaaaatctatattagtctccgttgtaaaagttgaatactcaatcgtttctcaacatgtccgtgtactgtcgtttgagaaccccgcactctctcacaaacgctgccaatttgtcctctgtgtacaaaggtggaaatatgaatccgggcctataactcaggttgtgttcgtgtatgccgtgtttctccaggacatctgcaaagtcattgcacgtgaatgtgcttggcagtttaagcgcatccatgattttttttgtaaaagtcaactgcatccagttgcggaacaccaaccaccccactgcgtcacgccatcaattcccttctccctaatcccgacgtcaccttacctctctggccccgcaagccaaatctcctgcccaaagcccccccccccctgcggaacacccccccccccccccccctgcggaacaccccccccccccccccccccctgcggaacaccaccccccccccccccccccctgcggaacacccctgcggaacacctctgcggaaccatcctgcggaacaccaaccaccccccctgcggaacacccaccaccccctgcggaacaccaaccaccccctgcggaacaccaaccaccccccctgcggaacacccctgcggaccccccctgcggaacaccaaccaccccctgcggaacaccaacccccccccctgcggaacacccctgcggaccccccctgcggaacaccaaccaccccctgcggaacaccatcaattcccttctccctaatcccgacatcaccttacctctctggccccgcaagccaaatctcctgcccaaagcccccccccccccccccccccttcctgcccgatatctatacccgtcttcctcctatccctacagtcggcggaacagtaaaatgaaacatcaaaaaaacggtataatggggcatgcagtgtgtgccatggggttgcatgaggcatggggttgcatggggcatgcggtgtgtgccatggggttgcatggggaatgcggtgtgtgccatggggttgcatggggcatgcggtgtgtgccatggggttgcatggggcatgcccggaggttcgtgtcgcgagctacccggacatgcgaaaccacacgctgcccggacatgcgaaaccacacgatgcccggaggttcgtgtcgctagctggctgacagcaaacgctcgcatcggtgaaaggtgacgtgtcacaggatagacatgtcaaacgtcgagagtttcagctgaaacatgataagggtttggtaggttcatatgctcggtccagcgaggatgcaccacatctttcgctggttaccactcaattcctggaaattctgaggcccaaggtgaggtgtctttgaaatagcttccatgattttgcgacgagttgcatcgcctgttcgctaatttgaattgcattgccgaattgcattgctcaggaaatgctcgctcgctcgctcaggaagtgcttgctcgcatcgctcaggaaactgcttgctcgcattgctcaggaattgcttgctcgctcgctcaatcggcgtttttaaatcgcgattgtttcatcgcttataggagctagatcgagttagctggcggatcttgcttacaggatagtcaatactgcttgcctgcttgaatgagaggcaaacaaggccattccgcacttcgcgactgttcgaaaattacaggatgctagatcgaggttgagctcgcggtcggaccttagcttaccggatagtgttagatgctgctgcaattgcctcctgcactgtcggcaattgttcgatagctgacaggatgctagatcgagttcagctggtcggatatgattacaggatagtacaaatgatgctgcttgcaatgctgcctgcactgtcgcaattgttcgataacttacaggatgctagatcgagttgagctggtcggacctagcttacaggatagtcaaatgctgctgctgcaatgcctgcctgcactgtcgcaattgttcgataacttacaggatgctagatcgagttgagcttgtaggatctatattacaggatagtcaaatgctgttgctgcactgcctgcctgactgattttatgctccattttttcgtaacacaggaaacatacccaagtcatcctatgtcaacttgacaggctatatatcgtcgtcgtcagaggaccaaggtacatgcaattgtttgcttttaatataatgtacaactgcgatgtcgttttacatttcccgtgtttctctatttattaatatctgacacgggttttcattttattcctgtgactacagatgaagaggatgaggtcgaggtagttgaggatgaggtcgaggtggttgagaatgaggtcgaggtagttgaggatgaggtcgaggtggttgagaatgaggtcgaggtggttgagaatgaggtcgatgtggttgaggatgaggtcgaggtggttgataatgaggtcgaggtggttgagatcgagcgccctttgtggaagtgtccttgctgcctaaacaatcatgttgcagcgctcgcccttccctgcgatcacctcgtgtgcggagactgctttccaagactgaattcgtgccctctttgccgcaactccatagctggccctagtagtgttagtgttgtgcctctgactgtgcaacgtgccaaacgtgggcagagagcattggaagtggacttgacgcatgataacgaagatgagggtgccgcgggtgctaactggtgttgccctcaatgcgcaaatctgcgcacgaaggggtcttcatgcaaggaatgcaaagctgcaagatgcgaagactgttggaaaagaagccaatacaagtgtgtgttctgtacaatcggcaccccttcgcgacggccgctacgtttgtgatttgatctgatgaaaatggacaccttgggattttgacagttgaccatcaatctttgtaaccgatcaaacccgttcagaagtgtcttttctcctgctgtctcacattgtgcgcgttaaaagcgttaatatgattgatgcaaaggtcggactcgaccgaaagcatgcaataatgcaaacgcacgcacacgcacgtgaagaagagtgatagatagatttacaacacaggatcacgcacgtttcgtgcaggggcgaagcccggcatttgaggtctttaggttgcatggggcatgttgtgtgtaccacggggttgcatggggcatgcggtgtgtgcggtgtgtaccatttggggaatgttggtgtgtcatgagggtggcaagggggcagagggtgtcggttgtccatgggcatgcgggttgtgtgccatgcggcatgcggttgtgtacaatgggcatgcgggtgtgcggtgtgtaacatgggggatgaggtgttctaccaatggggctgcctgttctcgtggcgggttgtacacacggagggcatgcggttgtgtgcggtgtgtacaatgggggcatgctgtgtgtaccacgggcattgcggatatggctttggtttgtgtgcggtgtgtaccatggggcatgcggtgtgtgtaccatggggcatgcggtgtgtgaggttgtgtaccatggggcatgcggtcttggttatgtgtgcggtctgttacattgggatgttgtgtaacgggggcatgcggtagttccgtttgtgtgcgttgttcttggttaccatgggcatgtgtgtgtacccatggcctgcgggtacgtgtgtgcgttaccatggggcatgcggtgtgtgcggtgtgtaccatggggcatgctgtgtgtaccatggggcatgcggtgtgtgccatggggttgcatggggcatgcggtgtgtgccgtgcaaatcgaccgggcggcaggaacgatgcccatcatttgtaaaccataggagctaaaaccccggatacaaggatacccgcggagcgggttttgccatctatttattcttccattatttcattatttcattcacaaaacccattcaccacataaataaatccctacttatccccacttgcttattcacgtccaaggtaaacacgatcaatatcatcgactattcattgattccttcatttgatgattacaacatttaattccacgcacttgtttcccttaggcacaacaatcaacatcatgggatccgtcccatatcatgggatcccaaccgaggtgtggctacacatagcatcattgactgtggaccgtagcggatcctcaacaccttttccgtgggcgctgagccgctccatgcaaaaggcagcgtgggagacccctgggtacatgcgacatctgttggtgaatagattctgctccatgcggaaggcagttcgtgccatgcaatcaatgggaaacatgaagtgcatactcgctttagtccaagataactctgatgtctctcccaaagtagcacgctcttgcatgctcagtgagacgtcggcggccatacacagtgacgggagcattgaagctttgagatgcatgcaagaatactggaaggatgtcatcaatgacaagattgtcattgagtgcatgggcctggccatcagacgcaaccgcccagacatcgtgaggagtttcctcatcactggaggacccgtgcgtctccgtctgaaccacttcgacgacccattcatgattgcctgcaagtttgggtacgctgaggtcgtgcagatcctactggacgctaatgcgatagacagaactggctacgccgacgatcactatgacaaggcattcgcacacgggcacattaccatcatgcacatgctattcgagagaggcctcacttcatttgacgcatgtacaatggctaacatgcattctgtgtactttttcgggagaaacctttcgagatcaggcaggacgaggagggtatcatgagagccgcaggacacgtcgtgagcggctgcaactgcaatatgtgtatgtcgaccaaaaacttgcagtagcagatgcacgccctggcgagtcacctgatgtagctagggattgtggattgacccccccccctctcagattttcgtgtgtcagattttcgggtgtgacacaaagatacacgcacgtagcgcagtacagtcagatatgagagctttgagttgtagtttgggcgaggacctgcgtaaggttccgtcgcaatagtaggccgtccaatgttcccgatccgagatctagttggccgatggaaggttccgtgggggattttcctagggaaaggtctgtttgggagcgaccctttgagagaagatccaattgggaattttcgaaggaatgttcgaggaatgttctttaggaatattccgataggaaaagctatgaatagagtgcct

SEQ ID NO: 311 - DNA, 20654 bp, unidentified
  misc_feature 1..20654: note = Fanzor polypeptide
  source 1..20654: mol_type = other DNA
ggatgccgtcgacaccagaggacttccgtcgcgctgcgcctacgacgccggatgcttacaaactcttgtaccggattctcatggaggaccccgtccgaagcaaggttgcaaagcagttccacaaactcaaggggtcgccctaccaactgcgattggcagggtacataaagacttctgtggagcacatcatgaacgacatccgcaaattgtacacgtacaacacgcctgcgaagaaagactcctttaacgacatcttcttttacaaggttcgtgtgctagtcatgaacacgtacctcttggcgcgcatgctttactacatgacgaatcgcgacacaaagcaattgcaccaccgcattgtgttgtatgccggggcgatgcacaccgccgcagctacgtcattcctagtgcactacattggcgcctccattgtgtccaacaccccgtcgacctttgcagctactactacaacaaccaacaaaaacaacaacaatgtcagaagcgtgaaccgttgcgtcaacgtcgagctggaccccgtgatagaggagctcgtggtacttggtcaatccactacacaatgaagtattgcgtccatataatgtatatataccttggtgtaacattattggactttaccgagtgtatcatcgtcatcatcggatatcttcaagcacgcctctagtaggtctgtacaccctcctttcaccagcagctctccagctcgctgtggtagctgtatcagacggaccaggttcaatccggagaaaatctagtgcagcgttttcgataccagcacaaccttggtgttcgccgataatatggcgatgcgaataagaacttcatacggaaggtcatgtagttgtagcctgtggaggagccaggaggaggaggggggacatatttttgcgaccgttggttgttcctctgctctgatgctgctgggttccgggaatcaaccattcatcaaagcgaattcgcgcatcagcctgttcctgcatgccgcgtactcgggatccgaagaggctcttttccacgccttctgaatcctctagaccgccaagtgttcctgaatgatgctgtttctttcggtgtcagacaatagcatgacaggatgtctgctcaattcacgccagtcccacggcacgtcggggttgtcccgtacgatctcccacgatgtcgcaacgctgcggttcctgctcaaataaatccactcccacggcttgtctgggttgtcccgcactgtctcccatgtcgccacactggggttctcgctcaacccgtaccagttccaaggcttgtcggggttatcccgcacaatttcccacgatgtcaccacgctggggttactattcagttcacaccagtcccacggcttgtcaaggttgtcccacacgatctcccacgatgctgccacgctggggttcccactgaatggcctccagtccgagtccttgtcgggactccccctgaaaccccagtttccagagaggcaagtgtgagtgctcaaccatccgacccacaagggtctgtcagcagcttaccttgttatcctttgggccagcttaactgctgaaatacgggatgaagagcacaatatgaaatcgactttagctgacctacccattgggttcaagggtcaccggtaaggtgtcccacaatttgtgtctccgactgtatcatttatacacattacaccacaacggaagcactgaattctggattgtaaggaggttgtgctgtacacaatgcggcaccattgggagattaggggagatttggacgaaaactgtgtttacaggacaaacgataaagatcagctcggttactgtccgtctaatcaataaagtataaggaagaaaggcctctgtatatcatagtaaaaatgtgacgcttcatgtgttggtgaaagtgcctgagaagaaagggttatttgtgggtttgcactggtgtctccttgagagttcccaccagcgacatttgcaaaatccataactgaccatcaatctctattctcatcaccaacgcctatcgaaacaacacatgttgagggagggcgagcaccccatgagccctagaggcctcaactcaggcgatgaagcttcggccgagccatacacgatgaagtcaagtgtaacattattcactggaccgagtgtacaaaacttgtaccggtaattggtcaacttttcataagagaagccccaaaagagacacacgagaggggtgtgattcccgctccctatcaaacaccctacaacttcctacgtgcaggcacactgaacaagtgcgacgcgatggaaacgaactggtccaagaacgtttggtactcggatgggtcagtctcagcctttcccaggtgcgtgtgcacgttgttgatgtgaaagaaagcccggttcctgttgacgatcgacagggtcaagatgatgatgatgtctgtgcggtagtcgctctggctgctgaatttgagcttactgcacatctgcagcatgtttatcatgatgcactgtatgttgtgcatgttcctcttgaactcaccagcttcgtcctcccaacagggctcatatatgacgtcatcgttcatcaccttgcacccatgaaacaaccaactgctagttttccagctgtgtgtggaaatcttagccggaggagcgttatacatctccccgtcctctacgtcggccacaattttctgagcgatggccttggcagacaactcccgtttgtcgtcgtcaaatatcttgtccagcgcgcatttatctgccagatggcttgccacaatgatcttcttgttcgtctcaccaccaccaccaccaccaccaccaccaccatttttgcctcgcatttcccacagcgccgaaagggggggcctggtagagctgatgatgcggacaaagtcaacactgtcgtagtcgaaaaggacaatgttgccactggcatcatagcccatgttgatagtgcgaatgtcagagtggaccatacccatagtccagaggtggcagagggcagtctcgatacctgtcctggtggcactgctcagaggtgtttcgtccgtcgtcggtacctcaagtctagggtactttatgtacagcttgacgttgacgttgcccttacactttaggacctcgatttccacaggcacgcaaagcttcgtttccttagacgtgagcccctccttcttgtggtacatgctaatcatcttggcggcgaccatctcacgaatcgctccgatgagcaagtgagtccagtctttcttccaaaggtcgctccctacaggagcccacccagcgatgtccatggtcttcaaaaaattatgcggattcttcatcataacgtcagcgcgcttggacgaacgcttgggaggttgaccaagcataagaacaaaatatcaaagaataaggagagggatacaaaagagggctctgtgaccaacaacacagggtgcgttccttaaatacaccatatcgtggttgtacatcaccagtacaattggcacctgcggtttcgtagcggtaccctagcggtttcctagcgaaacatgggtatatctttctccgggctagtgagtaaagagatccgcgccaatttgttgcgcgatcacgccgagagtttccaaacgttccgtccatttcaattaagtggcgacgacaacaggacgacgatcatttccaggtggcacgtggacatactggttatgttcgcgcgacacgtacacgtggacccgaattccgcggaaggggggttcggtatgtcttcctcttcttgggcagccccccccgacaaggtgattgttgtgggcgccgacgccgacgatttctcgaagctacggaacagtgtcgcgttggacatctgtgtcaagtacgggtacgtaaacacgttcgaaggaaaagctttcgccaaacggaatgctgaccacccccaagccaaaaaaaatctccggcaggctcaccttaaaaaaacaagggtcgcgatcaatgcatacaacaacaaccttgctctgaaagaaaaacatggtgaacacggtgagaagatgcatcggtctgtctccttggaaacaatcgctgatgaagccataaagttgggggataacgattgggacacacaattattgttatcactgatcgcggtaggaaacacgctgcacagggcgttcgaactgcgcaaactcaaacacgaaacgaaaacacattttcgcgaaagagaactgctgatccacacgaccaaggaatttgtaacatacgccgtcaatcatttctacgcagctcttacagagctaatggaacaaaaagaagaagaagaagaagaagagtcatcctctgaaaacgaacatttcatgtgcgtcgcgtacgagtatattcccgtccgaaggaggcattcaacaaagaagcctgtcgcttgattacaatgtgtaagtgatgcacgtctttgaggagcttgcgcttacgctgagcaacagcatgcacgaactcatccgccgtcccctctgcattcccctgctgtgctagaacctggtcgcgactgaatgttgacatgtgcacgtacacatctactgtgcgctcttccggcgggaggtcgtcgtgagagtacgcgcgtctggctcgccccaccacctgctcaattcggttggcgcgccagaaaggctcgagaacgtgaaccgctcgcacgtttcgtgtagagatcccctcggagcccgactttgagatcaacagcaccgccgctatttcccctctaatgttgttcgtcgcgtctttaaattcagtacggacgtcctcgcgcgccgcttgagggagctcgctgacacggttgttgaaaagggacaacaaaagctccatgcgttccgacgattgttccgaccccgacgagaacgtgatgaaagacagcccaatgtcattttttgtaccgggtggggggggaacgcggcgcaagcgcaattgtgttccatcggagaagcattggatttccccgaagccgttcgcgcgtagaacctgtccgaagattgcaataccttccgcagccctgaactgggagtatacgattgctgggaagccaccaccaccaacaaccgttttggcatcgccgtttttttttgtcgaagaagaagaaggtgacgacgacggcggcgacgacgacaacattgggtaccctgcatcaagtgagttgacacgccgttcccctccccctcccctcctcctcctgatgtccgttgatgatgatacagaaaaaccagaaagaattaactccaatacacgagcgaactttgacgataacacttccagggtgtactccctaccccccgtagtaccccccgtcattaggacggaattctctcgtcgttcgttttttagtcgaagctgtccaggacgctctaccagacgctgcaccgcggtctcaagtgctttctcgtagttggcggacaacaccgtagcagggctagtccggtaggggcgttgcatgtcgtgtgggaaggcgaagttacacacggcgcgtgtgaaaggacggtaccccatgccactgtcttcttctgcatcccccttcatcctcctctgcctcgccattttctcgcgacgcacttcgatggcgcgctggtacccgtactctgcgaactggtaggcgctgaggtgcgtgcgcacgatcgcgaacttccgcaacgtcgggtacacagatgcgtcgtgaccctcgaaaaacgacactcgacctcgcaagtgcccctccaacaggtccaaatttcttaagaagctcctcttcttttgagtggtggtggcaactggggggtcgtcgaccagatacatggcgtcgaactcatcgcggttgtcagagaccggtttcaacagcaccggtctggccatagcagctgctacacgatccttcggaagtcctaaggcggttgcaatttcaagatctatcgtggtggtggcactgctccgaacgaccaggaggtttgtgttgtctgtaccggtatcggcggagatgcgaaagccctcagggaccagcgtgatgcggacggcagggcgcaggaggcgccccaccacggagggcgtgaaactctgcaccacgggaatcgatgagagaccagaaatctgttgttgattcacgaaggcttggtgcggtttcaatgtccttcccccactattcccttctactactacatgcatgtcgagattgttcacgttcatgcgcaaacggatgatggagtcaaatctgtcggagctaagaagaggccatcctaagagctcttcttcgtcatcatcgtcatgatcatcatcattttctaatttttttttcatacggtggtagctcctcttattgtttttttcgcgaaagttgtgtatgcgactcaccaacacgtccagctttgacattgtagtatggtaaaaacgagtataaaaaaggtgcgtttaaaaaatcttagagagagatagagacatcatggcgtctctttcgcttgctgctattgagagcgatggagtgctcgtggtagcttctgcaggggctcgcgagcccccattggttcttgctgaacgaacgaaacttcttgcacaagagatctcgaggtgtcctgttggaagcaatgacggtccgagcgtgactctatcagcactcttagtatttcagaagaattggtcgaagagacgcggcaaaaggcgtgggcgaaaatcgcctcagtcgagtacctacctactcatgcatgaacgtttttttgagaaccacgaagagatcagcagaggagactgtgagaccatgggggacgaggttttttacagaacaaggggtaatggcaacacggtgccggttgccgagtttgtttcccgaaaatgattaaatctacgcctctgtaaaatctgcaaggcctccgagatccttagtgtctccagaacccaagcagtatccaactcaactaaaggatctggtgggaagcgttcactcaatcgcaaggctgcactgcatggaacactattgggtcaagagacgtctgaccgcttccacagtttgcccaccgcagctctgcttgtggatgttgacatccatcaccgccgcccagtgggtggtcgcgacaacaacacaacacaattatgtctcactccccggcccgtacacagacgtaagcacaactcctcttcatgaagtggatgaacaattcacatgcatcttggagtacctcggcgtcggccgcaggcgatgatggagtgatgttgattaatgtcgaagtattcagcgagaacatcttgtacttgcggggaggggactgatgaagcgtatccttgggtgtcatgttccatagggtcagtgcggcgccgatgatatcattatcatggctcgccttgttcaatatcttgcggcgaagagagtacctcttgggagtgttcataataatgtatgaatgaacaatgtaaagccaattttatactcgaaatcatcactaccgcaattttgtaccgcatttgtacaatctgtataaggattatccgcggattatctcatccatcatgccttcttccttcaaggtggggtttgagccgtcgcacatcggggagcagtgtgcccggtacgccgacgtgcgcaaattatttggattttgcgaccagggtttacaggttatgtttatccagcgcgaaaacaaaaactgtagaagcagtcttcttgtacgggaatgtgagaagagagttcacgtcccgaagtgcaatctcgggggcctcctatgtgtgctcagaaggcggctgatattgttggagcacatgagagtaactgggcaaacgatgaggatggacctccaccacacagtacatgcactgttgttgaagtctatgtggagtggtgcacgaatggagaagaagaagatgactcatcatcagcatcgaggaggaagagaatgaggagaaaactacgactgacccgcatcattgcagccaatgaagcatgcgccgtggggtggggagacgatgattcatcagttgcactgcacagcttctttggctacaatgacgaagacgaagacgatcccaccaattttttgtccattccgcctagtgtggtaaaaggtgtggaggctctcctccttcagcttcccaatctgttcaacgatcatcttgctgactcagctttagagaaggagaagcttgtctgccgggctttgaataccactactacttctccacctcctgccgtcgatgtgccaataacctcagttcggaagatgtacatagttgtcgaataatgtcttcccaccccactcgcgcaaacacatctttcttctctgtttttaaaaaaatgaaaataattaaagtgttgctttgttgcaaaatgtttgatacaacttacgcctgtctgcattgttcctgtgggctatgtttggattcatggggaacatggtgaattgcgacatccaacgattcgtgaacagcgatggggtgacccctcacatcgttggtgttacgtgcttctttttcttgtttacggtcatcgatcagggcaacagtggtgcgaccacggatgtatgggggatctggcttaaaacaatctacgtaaacttgctctttatgttaatgaccaagtccaagtggtacttcgttcttcctgtcctgatccttttgctggttgatcaatccatcaagaagcaggtatcgttcaacgaagctaaaagtaccgaagctaacagtaccgaagctaacagtaccgaagctaaaagtaccgaaaattttgcggaaggaggaggaactgctgtatcgaagcagcgacagttgcaacaaacgttttccaacgcaaccaacatcattgtcccgatcatcattgtcttcgggacggtgcattattcattttaccaaaggtccctcagaggtgacaaacgtttttcttaatataactttttgttcaggaagaacaaatgcaggttccagaaatgaaatgaaatgaatggttgacatacagctagggacatttgatagtgggacaccttgtattttggggatttgaccaattcaagttttgtaaccgatcttgtcaatacagatactgtcttcaagagattgacacaaaacattcaaggcatgtaaagacacagaagttacatgatcaaagtagcctgacaagtcaacgtgttggcttacatcgtgcgcatcaataatcattttcaaagcgttcctgtaatcaaataattctgctacatctggaattattgggcacgcgcagcgatattttcgcttgagcaaactgaacacattctcaatagcgttaaactatggactgtaaggaggtacaaagagcgggcgtattcctacagaatcgaacgcagagatcgtctcctttctatgatggaactggatattgtcaaggacagcgacagtaccctgctttacatgtagctctgatacaaactgtacaaagtcgactttcttgcaattgtgatcaaggattttgtaatgaacgatacctttgacagaaacggcagcgatcagcgtcaatttggacattcgcaatgtccgagaaatttggatatttaaacgtttgccgcgttgacagtaccctctgcgacaagtgtcaccgatgtaaaaacccgcctcatcaatgcttatcaaatccgatgtcggaacggccagatactctttacaaaaactttcgacagaatatctgtggtcattcttgtgtcgaactgttttgtatgcgcgcttgcgggtgtagccaagtctgcgtgtgtagcgtccaaacgtttttggagacatcttgacagaggacagagacgtcacaccctctgcaagctgagacattgtcaagaagggattggagtcgatcagtttttttatagcatccttgatatcttcggtaatgacgctcgcccgtttcttacgatgatgttttatattggctttggtgacccaacgttgaagtgacgattttgatactttgtacaacagactaactttcctcaagctacaattatagtatttgtagtgaacaaccgcgcgatgtcttacctctgcatcaatcatgataacgtgcgcgtataagggtataagtaaattggtatcaccaaaagaaaaataatactccctccctcttaatgggggtggtgtcagaccaaggagacgatgacgatcttaacatcatggtggtcaagaagacgcttaattctctgtgcatggttgtgtcgaggcaacagatctgctcaaggatccaaagcatggtactcttaatcaaccacgcagttgcagaggcatacttattcgcaaattttcatatcaccagatgcctcgatgatgtagactttgacgtgaagcagttgccgaacctggatcgaaacttttattacaggtgcatccttgcggtctcgacatccaacgttcgaaaggatacgctgggccagagcttgaaggatagcatggttgctttcaacgctctcaggcctgcaggctacgtaaaggtggacgttcgtccatggggacaggtaatcgcagacgtctcaatacaaatggcgacgatggcatgcaacagcgtctgggcaaacgtggacagggttgtaatcaagttcctgcgcttgaaatatccctcgtttaagaaacatttcaagaagattgtcaaagcggtggccagtattcagaatcggacgtcgacaaaatcatcccagcgggccttgtgcatgcgagccacatcaaagaggttgtcaggcacttgaggactctcttgccgctgccaagagggaagcagttcaacactagagcgcacctgacgatgcgactgttccatcacgtgcttacagagttgggggaggtcggacgagcggtgccaaaagaaaaaaaaacaaaaaaagtcgcccccgtctgtttagtatccttcctcgcaagagcggcttcacaatgtcttatgtccctatatcgtccatgacgctcatgaagcttctcagcatgggtgattcaccactcgagagcatctgtggcgatggacgtcacgcgaatcataacatgttgtggcgaaagtacttcaatgtccgaggtcttgagacgaaaatgtctcgctttgacaaccgaatcctcagcgacggtaaaggggtctcggtccagatgaagcagaagggtaaagatgatgtcgctgacgaaggagaaaacgcaggctatcccaaagacgcaggtatcgaagaatgcaaggacgcttctttgcgcatgggtgctctgcgagtcggagtcgaccctggtatgacagatatcgtcactgtagcatcttctgctggtcgcgtcaagtctttcagctccgctcgctttagcgaagctgcagggtacaagaccagcaagcgtcgcaccgacaaatggaatgccgagactgaagaactcgtgaagtccattccatcgccgactacgagcagtatgtcagacctgcgggaccatgccataggttacctcgcagcgctcccgatcctcctacaccaccgaggcagcagaggctaccgatcgatgcgattctttcgatacgttggcaaacagaagacgattgaaaaagtatgcgatgtgattgctccaagggcgcagacgaccgttgttggcttcggcaactggtacaaccagggatacggcatcagtcgttcatgttctgggcccgtgaaagagatcaggaagtgcctttctcgtcataagaatgttctgttcaaaaacgtcgacgaacgcaacacttcatgtacatgtcacggctgcttccagaggctagtcaacatgaaagcagacagtgtcgtttggcgcagagattacagagagtctcctatcgtagggactataacgtttgagaagcagaagacggtggtgaagaacgtcaaggtccacgaagtactgcactgtagagacagtgtcaaaagcgcatcatccaatgtgcgctgtggtgcaacctggaaccgagacgtgaacgctgccaagaaccttcttctgcttctgacaacgtggatggacgggagagagaggccggtggcattctgtgtgccctcgcctccccctgaaaccccagtttccagagaggcaagtgtgagtgctcaaccgaccgacccacatgggtctgtcagcagcttacattgttatcctttgggccagcttaactgctgaaatgcgggatgaagagcacaaaatgaaatcgcctttagctgacctacccattgggttcaagggtcaccggtaaggtgtcccacaatttgtgtctccgactgtataaaggttgcctgacgactgactgtattattcatttgaagcccagcccagcctaatgcgtgcgggaggagggggggtgctcaaggtcttgatcatcgataatacctccttgtcgaatgctgatgctgatcatttctacgaacgtttagaagaatggatcgctttgcaaccgcgtcacaaggaccaagccatacaaagcttgctttttcacgggctgcacgccgctcaaacgatcctgccagcagcatcaccgacgctcgcggtcctagacaaggaacgctccacggctgcatccgctctggagctggaaaagataaggtttgccgatgctctggagaaggaacgcgtgaagttcgccaatgctctagagaaggaaagaagagccgttacggtagccgtggagaaggagcggtttgagttagagcgtgtgctcgagacgcgagtgcgtgccggggtggcacaggggtgtgccgaggaacgagtgcagttgcaagccgttgaggcgctgctcgctgccttgcgcgaccgggaaatcgagaaggaggtggcacgtaggacagtcgacacaaaggtgttgcggatgcagctagcagatctcgaacgagagatggagatcctgcgtcgttctaacagtgcccggggcgctgtaggcgaggagcgtatttcgagtttccttagacgagagtggcctacgtcggaggtgcgcgacatgtcacagtctccccacacctgcgaactttggtggtactgcgcttccaacaaaggaggaggaggaggcgatagtttttgccgttcatccaacggctccaatggcacatctcctcatcggggccgtgttggtgagctgtcgctcggagaacatctccggcaaggggcctatcaaactggtgatgatgccatctcgcggggggggggggcagatcgataccgatgctgttcgcaggattcaacagcaccagtaaggacgatgatcgtgatggtggtggtgatttggtgtggctcaagggggtgcttaacgttttcctgacggtgacgcattacgagcacaatcgggcggcctcctcctcacgcgtttcttcctctgaagatgaggatcgccgtaagcacaacacgaaagcgatggtggccaggctctcaaaaatggtagagcatgtcggtagggttcgctcgttcgtgcacaacgtgcgtactacacacctcgcagcggcactcaaccttacggccaaggcggacgtggagctacgggagctgttctccaacttggcagacgtgtgcaaggagatggacaccgagtatctcgatggtgcggcgaacgttaagtctcccaaatgcgacgacacttcaaacacttctgccccctcatcctcatcctcctctatagtagtatgcgagggtcatgtttgtgaagagtgtggacgtttttcccgttcgtcgcgtggtatgtccatccacaagcgaacgtgccggtcgtgttcgattattcaaagcctcgttgggctgactcgcacaccgggcctgccgccacttaaaaaacagtacatcgcaaaattaactatatgttgagggagggtggggggatctcagccagtcagtaataatgatgagctcccccgctctgaggcctcagcgtcggcaatgaagctattaagttagcggagccatacacaatgaagtattgcgtccatataatgtatatataccttggtgtaacattattggactttaccgagtgtattatatacgtggtatgaaggtgtttgtagtgctcaccttgttcgtgggaatggcgctcatcatccacggcatttacgaagagaagttccaggaaatgaacaagaacgtcagggtcgagtacagattcctccctaggacgctctacgaagagcaactgagcaagcaagactccgctctcacggcaaagtttaagaacatgttccaggaggactcgccgtggaagtagaaggttgcaacagttgccgagtttgtttcccgaaaatgattaaacctaccacaataaaggattgttgtcggcaaacaaaaattgaatgcgattcgatcacatccatgacacacacacacacacacacacacacaactggatctatggacaagtacacgtccccacccattgtgatccatctcctcctctgcatcgccaatgtcgctaagaggaactgtcagaatcttgctcccaaattgccacaaatcgaccacaagatgtcgaaacttcgtgaacacctcaggaatatagaagagattgtcgattggctcagcgggtgggcgatgaagtgcactgaaaatgcagataatctcggcgcactcgttgacatcaagggtctgcttcacgtgcctgtgaaagctgcgtacaagtttcttgtggaaatcgaggtcattctcaacgggttccgctactacgaattcaaataccctgatctcttgcgcaagcacagaggaggaaagcttccccaagtaacgattgagaggcgcaccgcgtacctcctcgataccttggacatgtccttctgcccaccaaaaatccttgtttacaacaacagagtgttcttcttgtcccgtctgctgtgtgatactactatgcatctcaacgaagatgttgagaaagctgctgctatgaccgctgtgaacgctatgatccagtcatgcgatctcgacggcaacgccaaggcgttgattgccgagttcgagactgtttaccacaacaggatgttcaccgccttgacaggccgccgttctacgccttcgacttagaagaagtagagaagcacgtgagttcctcccccaggggggggacgacgtttacgtttttttcttccgaaaagtcattgctcttgtcgcacggaactatgctagccttgtaccggtagcaatgctggttgtagcggtatacgttcttctcaacatcctgaacattgggtgatttgatcacgatacaacggtcccccttgcaactctgtctgaatagtgcagccaacccgagaccgaatatgatcgaaatgattactgacccagtcttggtatcgaatgctttggtaatcatgtcactgtcacaacatcgtactgtcacgctccatatttttttaaagcgatgtgtggcattgcgttgcgttgcgtctcaaaaaggtgccgacccacgggcatccgcgaacttcatcatttcatcaagaactgacttgctataaccatctcctcctccatcattggcgacaactgcactgctacttctactactactactactactactactacttgatccaatagccggtctaggtaaaaggttgaaggaggaggcaccaccgctgtcattatgtgtcgtcgtcgcatcatatgtgatggcaaaaattgctccccccccctccccactgtcgtcaccactgtgtctttgaagatacaccattaaccagtacgtaagtcccgcagaaaggatgaatattgtcatagtgccaagtactaccgaagctaccgatcttcccgagcgcgtgttttttgttatgctactattgttgcacgcgtactgatgcgcgttcatcatagacatcggcccataacggctactatgatttgtattattatgctgaacgtcatcattgacgccccccaccccccccatcgttttcgccactttcgatgatgatgacgatgatatagacttactcgtgacgagcgcgaaaacaggaccgccgtcatggatcctacaaccaaagggacgatcacgttgccgcccaatatcatcccgtgaaaaatcattattatttaaagaatatttacacaatacaacactttttttgtattcattgaagcgtgaagcgtggggacaccagtctgtgtgtaacattattattattatttacttgacagagtgtacaatctcgggtacaacctaccaaatatggggactataagcatacatagagattatttgaatataattgatgcggatctcagtttacacgagaatttcaaagatgttattcataaagttattaaaagaatatggaaattgaaagaagacgatcaaactctaagagatgtggccaccgcagttcttgttttttttcagaaacacattaaaatatatacctatggtgatgatgatcaagaaggtgtatatgatggagttgcttttgcggtcgctgatgccgtttttcataaagctgaaactcacattgtcgaagcatgtgggcatgctgcatataatgcttacaacaacgatactaatattgatcatgataaattaacaggcattggagttaaagatggaattgaagttagagctgcacctcccccccatgtaactcttccggctgcacttcttacctctgtaactccttcatctgcacctcccccccctgtaactgttcctgctgcacctcttacctctgtaactcttccggctgcacctcttacctctgtaactccttcatctgcacctcccccccctgtaactcttccggctgcacctcttacctctgtaactcttccggctgcacctcttacctctgtaactccttcatctgcacctcccccccttgtaactcttccggctgcacctcccccccatggaactcctccaggtacacctcctacccccggaactcccgtagttgtatcagatgcttctacgtctactgaccagttgttggatgtctctggacatctacaaattgaggaagaggagcaaccttcagtttcgtcgaatgttgttgttaaagaaaacaacggttcggtcagtgtcgataagatcaaccctgtaatgatattgcgctttaagcgtgctttggacctaccgaatgaaatattggaacggattcttacccaccgaatgaaatattggaacggattgcttcgcatgatctgtatcaagggaccggtataacggacaagagtatagaaagtgtttcgtccattttgaatgaggcgaagttctcgattccgatttccgaagaaacctttggagcatggacaaccttcttcttggatggtgatggtataggagggaatgattcatacaagttaggttactttattaactatatttggttccgggtgctgagacgactaatgttatacaggttgcgagcaactgacaccgaagatcaaacgataatcgaagacacaatcagtcgtatcaccgtattccttagagatttcacagacaaattcaacaccctggaacaatcactagaactcgtcggtagcattgattggtcttcaatacatacggatgaagacttgatcggttttgaaattgataacggtgacttaaaaattatgcgatatgacggtgtattcaaacaataccaatcgacgttggcatcgtccgtgttgtatgataacctgcgattgcaacgaacacagcttgagtcagatatatcgtacttgcttggtggagaacaagtatctttgcatgcattcccccaccatgccttttctaccgagacgttcaaagcacttgcagtgtcaatagagaatttcaagacactcccagaccacgacaagttagatatattcagggaaatcaagtacaaattccattaccattctctgctcgaaccaaccaaggctatcacgaaggtgtccaatgatatacaacgcatattcaatgtaaccaaaatattggggtggacggtctttccgcttatttataacctcaaactaacagacgatgttatcagggagagagtaaatgctatgaatatcagcgacccaggtatcgttttgctcgaaattgcaaaaacactgaggccgtttgtcgatacacctttggacatttttgaaggactgaagaaatacactgtgaaccctgacaaaattgatcaggtttacaacatgatcatcaaccttcgacgtttcgagaacatcagcaagggcaaggatgacgaaacattcattccgtggtcttatgatatgtccaaaaactcgattgtgatcgagggtgcagaagaacgtattgtggatagagttgtcaaaaatgtagttttcaaggaagtggaagaggcacaaaccatcatgtcaaatgtcaattcgacagaagcacgaccttctcaaaatacagaagcatcgaacaaatttggaattattgccaacaccattggaaatatctttcgcaaagaagatgctgaatccagagctcccgccagcaatgagcaaaaacatgataaaaatgatgaaaatatggcagccgaagccgatggagcagcagacagttccgttgccgacaacgccgctggagccaataaaccacccgccgaggccgatggagatgttggagccggtggagccggtaaagtcaattccgaagcaagtcccgatgctaccggaaccaccaacgccaacgccagcaataaaaacaaagaacaaacaggtaatggaaccgctgctactgcagccaccagcgccagcaccaacgatggagctaacggaactccagcatcttcagctccactagatccgttgatgggtgaggctccaccggatacaaaaaataatttttggggaaatatttcaaatgctgcaataaataagttggttaaaagaaataaggagggaaaacaatcaataaaaaagttctttggatttggatcaaaaaagcagggagggagtggtggtcctccatatcttccggcggaatactaccaacatcgtcatcaacaagcgggcggtggtgtagcattttcgaatttgttgaagacccaacgtgagacggagctcaaaaaagttcgtggcaacttatcggccgctcgtatgcaacttttacatcatctgaaagatgttcgcaagaatttgatcacgatttcttaccctaccatcggcatttactcaagtatcctgcaagatttggtggactttcagcgtatagtggaccgcatcacagacaattacgtgagcgtcaatgtcgtggacgaggacggagatggtggtgacgaaggtgctggtggtggtcggtccgctttgattagcaaccgggggtcgacacgtctttcatcaaaggggttgttgacaatactgtcgactcgtgcatccattagtcaggttcacgtcgtttacatgatcaagctaatacgaacaataacacagttgttaatcttgtacgtcactgaacacgtatttgcagagcactacttgcgcaaggtgcatgtgaacacattgaacgaccccgatgccctagatgatgtgccgttgaagcatcccgaggcaagtctagtaagctttctcttcattttcttggtgctcgacattatcatccaggtcatcattcttgtagcactggtgattgtcatgtacacatatgccaagtcatcaaacacgtttgttatcaacagcgccttcatcaccgatatcatcatcgacttcggcatgcaaacgctcatcatgagcgtggtggggtttgtcattgccaaaatcatgatgaagaagaagttcttcgagtaccctacacgagggttggcggtttccaaggcatatcgcaacatgatgatgtccattgcagttgtgaccacagctatcccatacaccatgctcttgaagtaagaaggaagagtggatgggagaagaatactagacacatacatattttctacacttagggtgtggtgtcaccccccccccccccccaacttcaacgcgatgatgcgcaatatagacgcgatctcctgcaacaggttgttatcaactccaacacatgttgtagtagtagtagtagtagtactgttgctaacctcgacgatgcacaaatcggggtcgggagaatggtgggacatggtatcgtcatgttcgtcatcatgctcgacaacaacatctcccttatctcccggaccctctgtgttgttcttctcttggacgacgtcctggacgacgatcaacttctcctcctcctcctccttctggtcctcctccttgttcttcttcttggtattccatcgggaggatgatggcggtggggggggggggggggggggggcgaatgagtgtcacgatgttttcttttcggcgtacggcgggatgtttagggtttagggtttatggcttcaaagtcctccatgtctttcgcgttgcgtgcgctctcgaactcgtagtcatcaaagtccgagatacccttggtgagccaggcgcactggttggagatcggggggggggaggcggcgatggtgtgaccgctacgctgcagccttccgacaacacacacgatgcgcttgaacactgttcgcatatcgagctccgttcggcagatccatttaatcttgaacttttcgtcaaaaaagtcggatggcttcaatcctcgggtggcagcaggttccctcagcatatctaggtgcatgacactgctcatgtagtatccgtactcgtccagacgtttgcgccagatgacacatgtggaaatggccatattatgttcttgcggtgccttttcgaaccgaccgaccgatgttcgttcggtgatgacgttgagacacgacgagatgacgaaac

SEQ ID NO: 312 - DNA, 20597 bp, Chlamydomonas sp.
  source 1..20597: mol_type = other DNA
cgtggctgctgtcctttacgaacagggattttctgttcgaactgccttcatgaagatgccttcgggaatgacgatgccctcaagatggagttcgtgcgttgcttgtttcgcgcctacgatcacgatttctgcttcgacatgccccctccggcgtgtgtgtgtgtgtgtgtgtgtctgctggttgatgttacactgtgggctcccctccagtcgcccacccgctcggttcctcgcggactcctttgtgggggctcccctccggtcgcccccggtcgctccgctggggggaagaggttaaagaggctccgccacttgtctaatgcggtatggtggttctcatccatttacaagcagtttttaggttggttgcttgaggatgagaacaaccgtgatgtagaatgataggtttccctgaattttgttacttgcgttattttttgatgtggagggctatagcggcacctgtgccgacacaggtgccgccgtgatgagagtggtcgcaacctcggggtagcttcctcgtctgaaatgccggaagtttggcaggtgcggtgagaaggtgtggatggccaacctggttgggtccacaccggcctgaatccttctgcattggaaaaggtggcagtgttgtccagcattgcggcggcgaggaggagagaataaaaaaatgcactttttatataattggtgtgttcatgtggcatgagacatgcttcttgtggcacgagctggccagtcatatatctgcggtcgacatgtatgtattgtccttgacatgcaatgctgctaggaagtactacatgcgcaatctactccagcttgcggtacttgacgtcacagaactgtcattgcgaagtgcatggaccattctgtcgcatgtgcactgcaagcaggtagccattcccacgagcttgcgccaaactgagttcctacacaacaaaagagtattgacaacaggggctgactgggcagcacgcaagggacacttgcccctattgcaatggctgctgttgaatactgaggaggtttgcacgacttatgcattcgacttggcagcacgcaatgggcatatgaacgttctgttgtggctgcatgacaatggcttaggcggcactaggacatcggccgattgggcggcatttactggtcacctacatattgtaaaatggttgtatgacaacacaaactttaagtgttctgagaatgctaccatgattgctgcaggcaatggggaccttgaaatgttgctgtggttgcacgcgcaaggtgtcacatgtaacacgagttgtgcaaactttggattcgcctgcgagcatgaaggaatcctgcagttccttgaatccgtgggatgcaaacgatgcatagacgaagcaaacactaacatcataaaaaatattcgacacatcattgagtgtgagcgactaacatccgctcggaactgaagccggtacaaggaatcctgttgttgcacgagtgtacacacgacaatttgtttgactaagctttttcacatgtattttgaatgtggctcccgcgtccaatcaggcagctctggtcatgtatgatggcaaggaacctgacatgaagacgaaagaatgttccctaccttgtttttgccaagacggtccctcgtctagcctcatccggtggtagactaagtaggattcagtgccttgcacaactgctacttgtccagtcctcctgcgtacaatgaacacgaaaaaaattccttttctcctgccccatggattgctacaccattaggttacactccggtgtggccgtacactctcgaaaggtagaagaagaatagcgtacgagtcctcagtcacactcactgagcttcactgagcttcactgagcttcactgaaccttgaacaaatataaacccctcatcgtcgtctcatctaatcacgatgaagataccaacattgagcatgttatgcatgaagcagattccttccaacgtatggcgcagtttgacaatacacattcagagctgcctgtacccgcgccaatggagatctgcaatcacgtcactgcaagggcatttgctccgttgctcacgacgcaggatggcttcgttattgcaattgcaggaggaccaggatgcttgccattggtcgttggccccaacaaacaccgtcgtacacaacacagctctggctttcgagaccttacgccacggcgaccacgttgttgtgatgatcggggggtgtcgcaatggttatgcacaccatggcattgtatctcgccctcacaccagcgatacaccaagcatcgctaacttcagctcccccaccgggaatagcaaaatgcgcgatgccaaacttcagtttgtgcgctacgacgtgttcttagctggacaccgcacgtttggatgcgtgccttgcaggggtgaggaaggagacgaggcgatgcaacgtgagcgagcagtcaacattgccggtctgcttatccagttgccccatgcaatcttgcacgagtaccaccttatcagaaggaactgtgagtgtttcgcctggatgtgcaagacgggttgcgtgcatacatcatccgatcaggtggatcgcattctgcgcgccattacaacatattttaggaaaggggatagatcgttcattctgcagtcaggcatgatcgcatcaaaatcttgtgtagtgtcttagcccgcatatccacacgcaccctctcctggtattggttttgacccgggatctaatccaaaaatattggagcaaccaaatcattgctccatgacatgttgagccaagagcatgatggcctggctgaatgctaccgttgaatttaagctagtccgcgaggaaccgagtgggtgggcgaccggaggggggcccacagttcacatcaactacgtaacttttaagtcttacacaatgtgtaagttgtttgtaaaagattcttgggaggttgcaacagtagttgcctcgtttgctttccgaaaataactaagcggcggaacgctgtcgataccaaatggtggtcatgacaagcagagcccccgtattcatggaaaaaatacagagaatggggtctagttgacgtggttattaagtggccacgtctagttgacttggtttcgcacgatgaaaggcacgagcacgtgactgaccatgtgattccttctcctctggaggtgttcgcggtatcgctctgcgatcactcgaactgccttactgacgcgcagcccagatatgcaaatcacctggaagaagaactcctggatttctgtatcaaagtaagagatcgacagtgtatcggcgccaaagaagtcgatgttgatgtccttggatccaggtcggatgatgtacagcctctccaatatgaggtagatggtagatggtacttcggtcatacacaaggcttccagcgcaaacaacttgtgtctgttccttttgtccatatacaatttggagtcaaagcattcagacatgtccattccatagatcttacagtcggagacgcaatttgtgggacaccctaccggtgacccttgaacccaatgggtagatcagctaaaggcgagtacatatttttgcccttcatctctgtatttcagcatttaagctggcccaaaggataacaaggcaagctgctgacaaacccaggtggataggtcggtttagcgctcacactcgcctcgatggaaactgtggttttggggggaggcgagggaactcagaatgcctcaggtcgctctctcccgtccatacacgttgtcagaagcagaagaaggttcttggcagcgttcacgtctcggttccaggttgcaccacagcgcacattggatgatgcgcttttgacactgtctctacagtgcagtactttgtggaccttgacgttcttcaccaccatcttctgcttctcaacagttatagacccgtcgattggggactctttgcaaactccgcgccagactacgctgtctgccttcatgttgacaagcctctggaagcagccgtgacatttacaagaagtgttgcgttcgtcgacgtttttgaacaaaacattcttacgacgtgagaggcacctcctgatctctttgatgggcccagaacatgaacgactgataccatacccttggttggaccagttgccgaagccaacaacggtcgtctgtgcccttggtgcaatcatatcgcatacctttccaatcgtcttctgtttaccaacgtatcgaaagaatcgcatagatcggtagcctttgttggctctgtgttgtaggaggatcgggagcgctttgagataagctctgacatggtcctgcaggacgaccatgttgctcgtatttggcgatggaatggacttcacgaggtattgagtctcgtcattccatttgtaggtgcgacgcttgcttgtattgtacccagcaacttcgctaaagcgagccgagctgaaagactcgatgcgacctgcagaagatgctaccgtgacgatatctgtcattccagggtctactccgacacgcagcgcacccactgcgtccttgcactctacgatatttgcgtccttgggatagcctgcgttttctccttcttcaacgacctcttctttacccttctgcttcattgggacggatacccctttaccgtcgctgaggattcggttgtcaaagcgagaccttttcgtctcaagaccttggacattaaagtactttcgccacagcattgtatggttctcgtaacgtccattgccaaagacgctctcgagtggcgaatcacccatgctgagaagcttcatgaaagtcatggacgatatcgggacgtacgaaattgtgaagccgttcttgcgaggaaggatactgaacagacgggggtgacttttttttgtttttttatccttcggatccactcgtccgacctctcccaactctgtaagcacgtgatggaacaatcgcattgtcaggtgcgctctagtgttgaactgcttcccttttggcagcggaaagagagccctcaagttaatgacaacctctttgatgtggatcgcatgaacgaggccctctgggatgattgtgtcgattttcgattctgggtactggaccaccgctttgacaatcttcttgaaatgtttcttcagagagggatgtttcaagcgcaggtacttgataacgaccctgtcaacgtttgcccagacgctgttgcacgccatcgtcgccatttgtattgagacgtctgcgattatttgtccccaaggacgaatgtcctccttcacgtagcctgcaggtcttagggcgtcgaaagcaaccatggtatcattgaagctctggcccagagtatcctttcgaacattggaggttgataccgcaaggaggcacctgtaataaaagatccgatccaggtgtggtaactgcttgacgtcaaagtctccatcatcgaggcatcttgtgatatgaaagtttgcgaataagtatgcctctgcaactgcgtggttgattaagagtaccatgctttgtatccttgaggagatctgatgcctcgatacatccatgcacagagaattaagcgtcttcttgacgacgctgatgttaatatcgtcatctcctttgtcttgcactacccccattaagagggggtgagtattctttttcttttggtgatataatattgcacccacatttccttatacacatttcctacgttatcatgattgatgctgagataagacaccgagcggttgttcactacaaatactataatcgtagtttgaggaaagttagtttgctgtacaaagtatcaaaatcatcactccaacgttgggtcaccaaagccaatataaaacatcatcggaagaaaagggtgagtgtcattacagaagatatcgaggctgctatataacaactgattgactccaatcccttcttgacaatgtctcagcttgcagagggtgtgacttctctgtcctctgtcaagatgtctccaaaaacttgtggacgctacacacgcaaacttggttacacccgcaagcgcgcatacaaaacagttcggcacaagaatgaccacaaatcttctgtcgaccgtttttgtaaggagtatttagccgttccaacatcggatttgttaagcatcgatgatgcagaaacgtgcctttcatgtaagcgttacatgtgtcacatatgtatagatccgtcaaacgccccccccgatcatacattgacatacggacggtttgtagggttaggagacacgcaaaatgaatcgattacagagtggcgccaacgaatcgcgcaatggttggtagagaaccccaactgcagagcctggccgataccacacactataagccccgaaggcaatgccctagttgtcaaaagattcacatggtgcgccagatgtgacggttatacagcagtttgacttttcattctactttttgatacctcttcacccccccaacgtttcccaaaagcaacgatctgcagtctggatgattataaggtgtgtcccactttatttgagaaatacttgtaaggctccaccgacacctgtatgttagtcgaatgccggccttcattccatttcccccgatacagcagttcaggaacgtcctgaaagagttgccgtacgtcttcggaagcgcaatcccgcagacgctcaagttccgaggcacggtcaaactgcacgggacgcactcggacattgtgaggcacttcattactggaacccctgacttcgtcgacaccattcagtctcgaaacagaatcctgttagtcgacaacgacaaccaaggctgccacatgtttctgactgcgaagaagtactccgatctgttcgatcgtatccaagcgatccatggagcagatataagatcgaacatcgtcgtatgtggcgagtactgcggtaaaggtgtgcagagcaaggtggccctgtgtaagctcgccaagatgtttgtgatatttgcgatcagaatcgactatgaatgggttgacatgaccaagtacagcacggtgttctgtcaggaggaatggatcttcgacatctggaactttccgacgtacgaggtggaagtcgacatgagcgacacgcagcccgcgcaagactacatggcggatctcacgaacgccgtggatgcagagtgtccgttcgcgtaccagctggccggcgtcaagggttgtggcgagggcatcgtgtggacgtgcgtagaccacccatcgtctcgtctgtggttcaagacgaagggcaagacgcattgcaccgccgtcacgaagcaagcggtgccgttgcagacagagtacatcaagactgtgaccgagttcgtcgagtccgtcacgaccgagtctcggttgagccaaggcatcgagtgcctggttgaacagggcgtggagttgcggatacatagcgtctctgagttttcgtcatgggtgtgccgagacgtgttcaaggaggaacgagacactatcgaagaaaacggattcaatgtgaacgacgttcgtaaggcgttgtacaggaaagcagggaactggtacaaacaaagggtggcaaccgcataactcaatatctcgtgaagaagcgtaattgtgcatggtaagtaaattcaacttaaaagaaacctgccaaaatggtcagatgtagcatgagtctgtgctcttctcaatccgtcttgcgacaccccccctaccccattcttctcccacgctttccgcctgtttgtcacagtccatatgtagataccggctacatttaatatgaatacatatatttgcgttcgtgtggcatacttgacatgccatggtcatgcgtgtgcgtgtgcatgcatgcattgatgcattcggtcgatgtgccaaagagtttccgtcatcccaatggggctcctccttaggtatcagtgccttgcacaactgctgcttgtccagcccccctgcgtacaattaacacgaaacaaattgtgatgattagtaaaaatggatcctgagacggttgttctagttggtgctggcacaagtgacatgaaaatgctgaatatcggcttgtgtatgcagatgagtgattacaagacctgcatacaacaagcactaactttgtcatgctcactaaacaaactagagagtgtcctcgcactgatttctgcaggatcgcatccaactaataagacgagggcatgatcagaggaagcagcgcgtaattcccgggcctaaaccaataccgggttcaggggatgcgtgttgttgatgggcgacaaaaaaacatgatggtgttccactgcaatgtgggttgctacaccataaggttacaccataaggtgtaccgtacactccagaaagcggtttcattttagtattccgttgactgtaaataagatgcatatcgataacctgttcaaggtgtgcgacaatctttacctatcagggcaagaagcagctctcaaccaccaactttgtaaaacgttgcaattcaagcttgttgtgaactgcacaaaccacacaccgtacataaaaccaaggaaccacaacacaacatacattaaggttgctgttgaagacaactgcaggcaaaaagaggtcacgaaactcacatcccatctcccatatattgttgatgttatgcatggagtgttaagtcaaaacaatgccgtgcttgtgcattgtcggttgggaagacaacggtctgcaacagttgttgctgcttatctgatgtgggaaagatgcataacgatgacagatgcgatcaagcacattcaaaggttgaaccccgccgcattccaaccagaagccaactttcaacggtcccttgaaatgtttgaagttcacctgaggggcacggtcatccatggcggtgcatccttgtcccatcccgatgacaaccatgaacaagatcagcgtgaccatctctgatctgtatgcaaaaaagagcacacaacttatgggggcttcacgatgcgaaggcatacagctagggacatttgatattgggacaccttctattttggggattctgaaaagttgaccaattcaagatttgttaccgatcttgtcaatacagatactgtcttcaggtgattgacacaaaaaattcaaggcatctaaagacactgaatttacatgttcaaagtaccctgaaaagtcaaactgatggctaacatcgtgcgcatcaataatccttttcaaagcgttactgtaatcaaatatatctgctacatctggaattattgggcacatgcagcgatattttcgcttgagcaaactaaagacattctcaatagcgttaaactctggactgtaaggaggtacgaagagtggtcgtattcctacagaatcgaacatagaaatcgtctcctttgaatgatggaactggatattgtcaaggacagcgactgtaccccgctgtacatgtaactcagatacaaactgtaaaaagtcgactttcttgcaattgtgatcaaggatcttgtaatgaacgatacctttagcagaaacggcagcaattagtgtcaatttggacattcgcaatgtcctagaaatttggatatttaaacgtttgccgcgttgacagtaccctctgcgacaagtgtcaccaatgtaaaaacccgcctcatcgatgcataacaaatccgatgtcggaacggctaaatactccttacaaaaacggttgacagaagatttgtggtcattcttgtgccgaactgttttgtatgcgcccttgcgggtgtaaccaagtttgcgtgtgtagcgtccacaagtttttggagacatcttgacagaggacagagaagtcacaccctctgcaagctgagacattgtcaagaagggattggagtcaatcagttgttttatagcagcctggatatcttctgtaatgacactcacccttttcttccgatgatgttgtatattggctttggtgacccaacgttggagtgatgattttgatactttgtacagcaaactaactttcctcaaactacgattatagtatttgtagtgaacaaccgcgcggtgtcttatctcagcatcaatcatgataacgtaggaaatgtgtataaggaaatgtgggtgcaatattatatcaccaaaagaaaaagaatactcaccccctcttaatgggggtagtgcaagacaaaggagatgacgatattaacatcagcgtcgtcaagaagacgcttaattctctgtgcatggatgtatcgaggcatcagatctcctcaaggatacaaagcatggtactcttaatcaaccacgcagttgcagaggcatacttattcgcaaactttcatatcacaagatgcctcgatgatggagactttgacgtcaagcagttgccacacctggatcggaacttttattacaggtgcctccttgcggtatcgacctccaatgttcgaaaggatactctgggccagagcttcaatgataccatggttgctttcgacgccctaagacctgcaggctacgtgaaggtggacgttcgtccttggggacaagtaatcgcagatgtctcaatacaaatggcgacgatggcgtgcaacagcgtctgggcaaacgtggacagggtcgttatcaagtacctgcgcttgaaacatccctctctgaagaaacatttaatgggcgttcctgcctcccggccgatttttttaaatttctaatcaggatttagagcctcctgaacgactcgctagcttgagacatcagcaccaaggaatcacaaatccgctccataccatgtttcgcaaccagtcaaaatcggccgggaggcaggaacgcccattatttcaagaagattgtcaaagcggtggtccagtacccagaatcgaaaatcgacacaatcatcccagagggcctcgtgcatgcggtccacatcaaagaggttgccagtcacttgagggctctatttccgctgccaagagggaagcagttcaacactagagcgcacctgacaatgcgattgttccatcacgtgcttacagagttgggagaggtcggacgagtggatccgacagataaaaaacaaaaaaaagtcacccccgtctgttcagtatccttcctcgcaagaacggcttcacaatttcgtacgtcccgatatcgtccatgactttcatgaagcttctcagcatgggtgattcgccactcgagagcgtctttggcaatggacgttacgagaaccatacaatgctgtggcgaaagtactttaatgtccaaggtcttgagacgaaaaggtctcgctttgacaaccgaatcctcagcgacggtaaaggggtatccgtcccaatgaagcagaagggtaaagaagaggtcgttgaagaaggagaaaacgcaggctatcccaaggacgcaaatatcgtagagtgcaaggacgcagtgggtgcgctgcgtgtcggagtagaccctggaatgacagatatcgtcacggtagcatcttctgcaggtcgcatcgagtctttcagctcggctcgctttagcgaagttgctgggtacaatacaagcaagcgtcgcacctacaaatggaatgacgagactcaatacctcgtgaagtccattccatcgcctaatacgagcaacatggtcgacctgcaggaccatgtcagagcttatctcaaagcgctcccgatcctcctacaacacagagccaacaaaggctaccgatctatgcgattctttcgatacgttggtaaacagaagacgattgaaaaggtatgcgatgtgattgcaccaagggcacagacgaccattgttggcttcggcaactggtccaaccaagggtatggtatcagtcgttcatgttctgggcccatcaaagagatcaagaggtgcctctcacgtcgtaagaatgttttgttcaaaaacgtcgacgaacgcaacaccttgtaaatgtcacggctgcttccagaggcttgtcaacatgaaggcagacagcgtagtctggcgcggagtttgcaaagagtccccaatcgacggttctataactgttgagaagcagaagatggtggtgaagaacgtcaaggtccacaaagtactgcactgtagagacagtgtcaaaagcgcatcatccaatgtgcgctgtggtgcaaccttgaaccgagacgtgaacgctgccaagaaccttcttctgcttctgacaacgtggatggacgggagagagcgacctgaggcattctgtgttccctcgcctcccaccaaaaccacagtttccatcgaggcgagtgtcgtcggtatttagtacttctttgagggtcgtttgaagcaaagaaaatcctgtttgaattgttcgtttgattcattcttagattcaatcggagataaccttgattcaatcgatctttgtttcctttttgaatcagtcggccaccaaacctaccgattgagatccgtttgaaacaaggttggttgtttaaaacatgactcaaaccatgttcaaatagatcttaatcaagccgtcatcaacgtgccccttgaaaaaggtttgaaacaaggttggttgtttcaaacatgactcaaaccatgttcaaatagatcttaatcaagccgtcatcaacgtgccccttgaaaaaggtttgaaacaaggttggttgtttcaaacatgactcaaatgatgttcaaatagatctgttttttcgtaaagcaatgcaagcactgaagactgagggcgcatatttggacagcaggactcttggatctttgttacagaaatcgaaagcaccataatgaatgaatccttagatagttaaacatgatagtaattagtgattgaagagctagatatatatgctactaaggaagtgcagttggccacgaagtagttcctcaggtacgaattgacgaaactccagcatgctgtgcttcttgttcatcaacgacatcgtcttcagcctcaaggtcatcagcatccaggcgttctgacgcgagaccagtcgcaagagtgagacctgcagacaaatgttcgttggtgagcgttagttgagatacattggcagcaatgcgcattcttccgactttcaaatagcagccatggttcaaaccaaattcgctatctgaatgcgcacctgttttgcacctcgagcattggaactcttgcggctccatgatgagctggacgataggtcgacttgctgcagctgccttaatgcctgcggaacaactcgaaaaagcaagtcagtcaaagtcgagacaaattctggtcaagtaaggcaccacttgacgagacgcaaaacgcagtaccttaaccgcacgcgcgggggcggagaagcaggtcgctacagtcttgggttgaagcacaacgattcccaaagcaaagtaccgcggaagcaaagtgctcgcgcgtgtaggtattgacggatctcagaagtaattcgggaatggctgaagctatgaaagcaagctcagtccaagttaattcaaggaaagcaggcagcatgtcgctatctgactgcgcacctgtttcacacctcgagcattggaactcttgcggctccatgataggtcattttgctgcagctgccttaatgcctgcgacacaactctggtcaagtaaggcaccacttgacgaaacgaaaaatgcagtaccttaaccgcacgcgccggcgtgggcggagaagaaggttgctacagtcttgagttgaagcacaaccattcccaaagcaaagtgccgcggaagcaaagtgctcgcgcatgtaggtattgacggatctaggaagcaattcgggaatggctgaagctatgaatagatcagtccaagttaattcaaggaaagcaggcagcacggagcgctattctgcaggaatatcgctgagtcgagaaccaattgacgcgcagtgaacagtgaaagcttgcacagccgctaagttgaagcgctaacccattgcgctgaccagtttgaactgtacagcatgcagtaccgccgtaaccgcacgcgcatgggcggagaagcaggtcgccatatttgaatcggattctcggggcctgcgcctgcggtgcatgcgggatctgcgtcgcaggacctagacaaccctgatgggggtcatgctaatcaaacctgatgaacaatgggggataatgatcccgaaacttctcatgtacccaaatatgattattccgattctggaaaacaaacaacagagccttgtgatcgttgcctcgttagtgcaagctgctcctcgtagttacacgaggctagttcgacaaattgtacaagatttcggaaattacagaatccaagcaggggcaaatttggcccttcaggaagcgacagaggcctacttggtgggcctcttcgagaacactaatctggcggctatacatgccaagcgggtaaccattatgcccaaggatatgcaggtgcgctatctacaggggttgggggtggggtggggggtgggtgggcggggtggggggtaagagttggatccacacaaaatatgctgcagcttctgggcagatccctaggtgggcagttggcctttggtaaaaatatgctgcagctgctgggacccgtacacgacaaaacacaacagtacactacactacactacacaacagtacacaacactatacaacactacacaacactacacaacactacacaacactatagaacaagggggttgggagggggatggggggggggggggggggggggggactgagctacttgaaacactcactcattcactaactttgatgtctgtttccacttgcagctcgctcagaggattcgaggggagcgaaactaggacttggcaagaagttgtggtgagttatgttttcatgcctgaaccaccctcatgtaacaacttaatgaatgcatgttacttatcaataatatcataatatggcttagctgaacctacccatactgtagcccgaaaagcgcccttgaggctgcttgctacagaatgggcgggagatgcgatttgccttgtatggtatgccttaaccaccctcatgtaacaacttaattaatgcatgttacttatcaataatatcagaatatggcttagctgaacctacccatactgtagcccgataagcgcccttgaggctgcttgctacagaatgggcgggagatgcgatttgccttgtatggtatgcctgaaccaccctcatgtaacaacttaattaatgcacgttacttatcaataatatcataatatggcttagctgaacctacccatactgtagcccgataagcgcccttgaggctgcttgctacagaatgggcgggagatgcgatttgccttgtatggtatgccttaaccaccctcatgtaacaacttaattaatgcatgttactgatgaataatatcataatatggcttagctgaacctacccatactgtagcccgataagcgcccttgaggctgcttgctacagaatgggcgggagatgcgatttgccttgtatggtatgcctgaaccaccctcatgtaacaacttaattaatgcatgtcagtaataaaaaatatggcttagctgcacctgcccattatgtagccgcataagcgcccttgaggctgcttgctacaaaatgggtggtcaatgcgtttagccatgtatgcatccaccaccctctgcacacacttaagtcaccaacatgataagtgcagcacattctaagcagcattatcttactcattctaatgtttttcccttgcaggtcattcatgaatgctggctgttgggagcaagtaaaggacgaatatgcagtagtggagctgcctggaagctgccatcatgtggtgccaagcttagccaatgggatattaaggcatgttagtgccctgaatatatagtagcatggagcagtaatcatagggtgactttagtttgggttttgtttatgagggtttaaaggtactgcctgtccttgttgaccaggacaggcagtacctttaaaccctcatacaaaaaacccaaaaatttaatttgaaatttcaagcacagcagtagataggcctattatcccttccaccaccttggacaatagccgggcctggtagttgacaatatacagccttcttgtgcgatacccacgagagcactgtattgtattcatcaattgtgcgatacccacaacgatgaatactttcccgactcctgaattagacctaacttccagccagctccattaggttgtacagcttccagccatgggttgtacagcttccagctagctccttaggttgtagaacttccagccagcttcaatagacttttactttgtgtgacaggttgtacagcttctagccagatccattaggttgtacagcttccagccagctgcattaggttgtacagcttctagccagctccattaggttgtagagcttccagccagctccattagactttcacttgtgtggcaggttgtaaagcttccacccagctccattaggttgtacagcttccagccagctccataagactttcactttgtgtgccaggttgtatagcttccagccaggtccattaggctgtatctctgtatattaggttgttgtgtagcttcgagccagctaagccgtcctcagcaggaaaattaaatatatgataccaatttgttttctggcattatatttgtttcctttcttgtaaaagtttctttcctaccattgtccaaagtgcgagtacttaaacacgcacacacaccctacttgggctgtttccaaactcctacattcaacttcaacttggttacatagccagacttcaacttggttacatagccagacttcaacttggttacgtagccagacttcaacttggttacatagccagacttcaacttggttacatagccatttgtgacacttgagattacagccatcatcttgctagcacctacaccccaccctagatttttgtctagccaatgaaagcacaactaatgtactacaaggtatggatttgtgccggttatcgctaggcgctcgcccgcctcggattcaaagcttcctacctctcggcagcctacatatgggagcttagctacatttcgaagtgcaatatcttcgaccaccttgaattccgtttgatattgtcttgattgacttccgtctgattcaatgaataagctgcttgaattgaatcactgattcaaactgtttctcaaggtaccctgattcaaggggaaaaccgcttgataggggttcattgattcaaaccagttgattcaaacgatttcaaaggtctgcctaaataccgacgtttagccgttccgacatcggatttgttaagcatcgatgaggcgggtttttacattggtgacacttgtcgcagagggtactgtcaacgcggcaaacgtttaaatatccaaatttctaggacattgcgaatgtccaaattgacactaattgctgccgtgtctgctaaaggtatcgttcattacaagatccttgatcacaattgcaagaaagttgactttgtgcagtttgtatctgagttacatgtacagcggggtacagtcgctgtccttgacaatatccagttccatcattcaaaggagacgatttctatgttcgattctgtaggaatacgaccactctttgtacctccttacagtccagagtttaacgctattgagaatgtctttagtttgctcaagcgaaaatatcgctgcatgtgcccaataattccagatgtagcagatatatttgattacagtaacgctttgaaaaggattattgatgcgcacgatgttagccatcagtttgacttttcagggtactttgaacatgtaaattcagtgtctttagatgccttgaattttttgtgtcaatcacctgaagacagtatctgtattgacaagatcggttacaaatcttgaattggtcaacttttcagaatccccaaaatataaggtgtcccaatatcaaatgtccctagctgcatgaatttcttattacacatccgggggtccgggggacatgtagtaagaaagacaatgaattctccataggggtatcatagggctgctgtcctttagggattttctaatttctggataatctaatttctgttcgaactgccttcatctgtctccaaaagacaccacctccccatcaaaaaataacgaaagtaacaaaattctacatcacggttgttctcatcgtcaagcaaccaaaccaacctctaaactgcttgtcaatggatgagaaccaccgtaccacattaaacaagtggcggagccccttttacctcttccccccagcggagcgaccgggggcgaccggagggtagcccccacaaaggagtccgcgaggaaccgagcgggtgggcgaccggaggtgagcccacaggtcacatcaaccagcagacacactactgatttacacacacacgcgacgccgcggatgatagatgcaggcaggcaggggaggttgtccgtgctggggaggagggagcaagcaagacgcccgccgtcaggagaacaagagacacgcacgcactgacattgacatgcatgcactgacattgacatgcatgcactgacgagcttgtccatcgtaagcgtgctgccaacatagcaaagctcatggtggaaactcaaagtatggctctgcgcaagtatgacttgattcactggaattgaaccccgcgcgccaaatagactacgtttcgaaaaaaattgaaacgattttctccagaacaacaacaacaacaacaacaacacacgtaatcgccaaattcactcactgaaatacccgaaatgtctggatccacaacaacaacctctgacgcccgccgcatttgcgccgggaccaagaaggacggttacccatgttcccgggtcctaactaacggccgtgtatactgccaagaccacgtcaaggaatctttcaaggaggagtccaatgcgtctgaagagccgatgactgctacagtcgaagactacgatgcgctcctgctcgagctcgagaactgtcggatcaagaatcaaacacttatcaagcataacgatgagctaaagctcatctccgagactaccatgcatgagaatatcctgctgaagagtcagctagttccagagttgtccccgtaccactttggacacgacctgctcaccagcctcaatctgccattctacaatacgaagtgctgcatcgtcctgctcggtttgtccggagctagacagtgcaaaaataatcgccaggccactggcctgctgtgcaccacgcacgcgtcatcaccaaagcatatagcagaaaaggtcaacaaggcctacgctacacgctgtgtcgagagacacccgaaggtcatcagcgcatatcagacacagtctgagtgcgtagccacgtacaactctgcgtgcgaggacaagtacaactactctgcggctgctgctccggcgccgtcgtcgttctcatcatagttcgttcgttcgttcgttcgtgcatgcatacatacatacatgcacgagcgaaccaatactttttttctgcttaacaagaattgtaaataagaaagtagctacagtcggagacgcaatttgtgtttagatcagctaaaggcgagtacatatttttgcccttcatctctgtatttcattttttgtgtcaatcacctgaagacagtatctgtattgacaagatcggttacaaatcttgaattggtcaacttttcagaatccccaaaatataaggtgtcccaatatcaaatgtccctagctctatgtataacttgcgcaaccaaaacatacagctagggacatttgatattgggacaccttatattttggggattctgaaaagttgaccaattcaagatttgtaaccgatcttgtcaatacagatactgtcttcaggtgattgacacaaaaaattcaaggcatctaaagacactgaatttacatgttcaaagtaccctgaaaagtcaaactgatggctaacatcgtgcgcatcaataatccttttcaaagcgttactgtaatcaaatatatctgctacatctggaattattgggcacatgcagcgatattttcgcttgagcaaactaaagacattctcaatagcgttaaactctggactgtaaggaggtacaaagagtggtcgtattcctacagaaaatgggtgttcctgcctcccggccgatttttttaaatttctaatcaggatttagagcctcctgaacgactcgctagcttgagacatcagcaccaaggaatcacaaatccgctccataccatgtttcgcaaccagtcaaaatcggccgggaggcaggaacgcccattagaatcgaacatagaaatcgtctcctttgaaatcgtctccttggtgtcgcactggggtgcatgtttgatcaggaggtgctggtgacgtacgatgggctcgagacggcattggacaagtattggagtggggcgcaagtacggatgacgcacgctttccggggtgtgttcgggacgcccgctctcccgatgggttcttgttgcatcactacatgtaatgatgatgcgggttctgagtctgagtctgatgtggagttctgagtctgaggtgcctggggaagggttgcaacagttgactcgttttctttccgaaaataagtaaacttaacagagtggggagtgaagtgacgtccactttcttggatgtgaaagaggcgagaaaactcaatacattaaacccagagtgggtagagacgttgatggga

SEQ ID NO: 313 - DNA, 28 bp, synthetic construct
  source 1..28: mol_type = other DNA
tcatcaaaaagagtgaacgagactagaa

SEQ ID NO: 314 - DNA, 30 bp, synthetic construct
  source 1..30: mol_type = other DNA
tcatcaaaaagagtgaacgcgagactagaa

SEQ ID NO: 315 - DNA, 31 bp, synthetic construct
  source 1..31: mol_type = other DNA
tcatcaaaaagagtgaacgacgagactagaa

SEQ ID NO: 316 - DNA, 32 bp, synthetic construct
  source 1..32: mol_type = other DNA
tcatcaaaaagagtgaacgaacgagactagaa

SEQ ID NO: 317 - DNA, 15 bp, synthetic construct
  source 1..15: mol_type = other DNA
tcatcgagactagaa

SEQ ID NO: 318 - DNA, 20 bp, synthetic construct
  source 1..20: mol_type = other DNA
tcatcaaaacgagactagaa

SEQ ID NO: 319 - DNA, 22 bp, synthetic construct
  source 1..22: mol_type = other DNA
tcatcaaaaagagagactagaa

SEQ ID NO: 320 - DNA, 27 bp, synthetic construct
  source 1..27: mol_type = other DNA
tcatcaaaaagagtgacgagactagaa

SEQ ID NO: 321 - DNA, 17 bp, synthetic construct
  source 1..17: mol_type = other DNA
tcatcacgagactagaa

SEQ ID NO: 322 - DNA, 45 bp, synthetic construct
  source 1..45: mol_type = other DNA
cttagggacaagcccctggctttcgccatggggtatctgcnnnnn

SEQ ID NO: 323 - DNA, 46 bp, synthetic construct
  source 1..46: mol_type = other DNA
tgctttcacaagcccctgcctttaggcatggggtacctgacnnnnn

SEQ ID NO: 324 - RNA, 78 nt, synthetic construct
  source 1..78: mol_type = other RNA
tytgytgyggyyaygcgayaaygccyrgggyggtcayccygryryarrcaagcycttrrgyrrytgacnnnnnnnnnn

SEQ ID NO: 325 - protein, 60 aa, synthetic construct
  source 1..60: note = TnpB sequence
VVAVAYEHAADDSGRAETDPRAGGRAPGNPPPAHRMLQRRVRVWLAAPGEERRPAPPCHL

SEQ ID NO: 326 - protein, 43 aa, synthetic construct
  source 1..43: note = TnpB sequence
MVKLLPDKQQQEALIDTFVKFNEACNFVSRLAFERKLYNKVLL

SEQ ID NO: 327 - protein, 55 aa, synthetic construct
  source 1..55: note = TnpB sequence
LVLFYTSITRLTTVTVKLSPADPDGLRRTLQTANGACDWISEQAWHHQTFRHLAL

SEQ ID NO: 328 - protein, 48 aa, synthetic construct
  source 1..48: note = TnpB sequence
MKLIAQIKLLCSEVEKQALMDTMRLMNSTCDQISKAAWSARKFGRSSL

SEQ ID NO: 329 - protein, 66 aa, synthetic construct
  source 1..66: note = TnpB sequence
SRLARAIPSAPVPACGRRQGTRPRGAEECAWPRKARQEGIPAEKPSVPIRYDARTYALRAAKGYVS

SEQ ID NO: 330 - protein, 62 aa, synthetic construct
  source 1..62: note = TnpB sequence
QKLVYRDIRENFGLAAQLAIRVIAKVVETYKNDKTVMHEFREFGSIVYDQRVMSFKGLDTVS

SEQ ID NO: 331 - protein, 64 aa, synthetic construct
  source 1..64: note = TnpB sequence
HKLVYYQVRQRFGLSAQMAVRGIAKVVDAYALDKRTKRKFFRTDGAFPYDARILSWDLESETVS

SEQ ID NO: 332 - protein, 62 aa, synthetic construct
  source 1..62: note = TnpB sequence
QKLCYLDAKCNGLTAQMAIHATRKVADAYKKDKKTLRQFRPTGAITFDDRVLSWKPAQQTVS

SEQ ID NO: 333 - protein, 66 aa, synthetic construct
  source 1..66: note = TnpB sequence
LASVAGRLKVPFALDPHTQGILGQAVGFDSADMIHRKGRFWLHIVVTIPDVEFQPSGDVVGVDMGL

SEQ ID NO: 334 - protein, 64 aa, synthetic construct
  source 1..64: note = TnpB sequence
LNTVRGRVRIPMTIGKYRELPLDRIRGQCDLVRRNRIFYLMVVVEVPEEEAISASDVIGVDLGI

SEQ ID NO: 335 - protein, 63 aa, synthetic construct
  source 1..63: note = TnpB sequence
HKLVYYQVRQRFGLSAQMAVRGIAKVVDAYALDKRTKRKFRTDGAFPYDARILSWDLESETVS

SEQ ID NO: 336 - protein, 64 aa, synthetic construct
  source 1..64: note = TnpB sequence
IWTVAGRQTISYVCGDRQGALLSTRHGESDLVYRGGEFYLLATCDIEDVPLADTERFLGVDLGV

SEQ ID NO: 337 - protein, 66 aa, synthetic construct
  source 1..66: note = TnpB sequence
SRPAVCSHNRFFGKRRWKEIERRYFRLRRSLQRKGTRSAKRHLRKLAGKVNRFRRDCDHVLSRRIV

SEQ ID NO: 338 - protein, 66 aa, synthetic construct
  source 1..66: note = TnpB sequence
ENIAVDSSGHYYSGDRIAEAGTKHSSLRSRLQACGTRSAKRHLKKLSGKERRFARDVNHVISGEIA

SEQ ID NO: 339 - protein, 66 aa, synthetic construct
  source 1..66: note = TnpB sequence
ANVASDSDGRRYSGSEVKNVRWRNRKLRARLQAKQTRSAKRRFKKLAGGESRFARHVNHCISKQIV

SEQ ID NO: 340 - protein, 66 aa, synthetic construct
  source 1..66: note = TnpB sequence
VNIAVDSEGTIHRGNAVNNVRYRHRALRGKLQRKGTRSAKRKLKQLSGKESRFARDVNHCISKSIV

SEQ ID NO: 341 - protein, 65 aa, synthetic construct
  source 1..65: note = TnpB sequence
DSVQPGTVIVVENLVDIRTRTKQRGRESRRRLHSWSFARLRSFLAYKAAAKGCKVVGVDPRHTSQ

SEQ ID NO: 342 - protein, 65 aa, synthetic construct
  source 1..65: note = TnpB sequence
ERAKGTSSAIALEELKGIRKRTTVGKNRRYRHNSWSFCQLRTFIEYKALESGVPVIGVNAKNTSR

SEQ ID NO: 343 - protein, 64 aa, synthetic construct
  source 1..64: note = TnpB sequence
RTAKGTGRIRMEELNGIRTRVKVRHGERGVLHSWGFWQLRQMIVYKAALAGVLVEFVDPRNTSR

SEQ ID NO: 344 - protein, 65 aa, synthetic construct
  source 1..65: note = TnpB sequence
AKAQDTGKGIALEDLTHIRSRITARRSQRATLHSWSFGQLRAFISYKAEVLGLPVALVDPRNTSR

SEQ ID NO: 345 - protein, 66 aa, synthetic construct
  source 1..66: note = TnpB sequence
MCSRCGHVHRRNRRSQSRFLCRACGFELNADLNAARNIARKYLASGGMPAAGGPLSTGLACQPAQA

SEQ ID NO: 346 - protein, 64 aa, synthetic construct
  source 1..64: note = TnpB sequence
ECPDCHTVDKRNRPERSIFKCISCGFEGEADFVASLNIRNRAAASQPIVAGAIFDQPLIPQLQA

SEQ ID NO: 347 - protein, 66 aa, synthetic construct
  source 1..66: note = TnpB sequence
TCSECGHCEKGNRRNQSEFRCRSCGREAHADINAAENIRQGRSKPAERDVVENRLSHSFRFRRLSA

SEQ ID NO: 348 - protein, 53 aa, synthetic construct
  source 1..53: note = TnpB sequence
ECPECGHTYKDNRKTQSKFLCTSCGFAGIADVIAAGNIARRAEVSRPNVAEAA

SEQ ID NO: 349 - protein, 6 aa, synthetic construct
  source 1..6: note = TnpB sequence
PSVRVG

SEQ ID NO: 350 - protein, 7 aa, synthetic construct
  source 1..7: note = TnpB sequence
AVTSPRL

SEQ ID NO: 351 - RNA, 96 nt, synthetic construct
  source 1..96: mol_type = other RNA; note = Spu native small RNAseq
tagcttaggttttccgaaccggttgtcgcgcggttcaatccctggtgcgggtgctagggccaataccatcggctccgcactaagaactagaacgac

SEQ ID NO: 352 - RNA, 102 nt, synthetic construct
  source 1..102: mol_type = other RNA
atagagcgagagattggttagattagcctttccgagccggttgtcgcgcggttcaatccctggtgcgggtgctgtgccaatacccatcggctccgcactaac

SEQ ID NO: 353 - RNA, 26 nt, synthetic construct
  source 1..26: mol_type = other RNA
tagtgcggagccaatgggtattggca

SEQ ID NO: 354 - RNA, 26 nt, synthetic construct
  source 1..26: mol_type = other RNA
tagtgcggagccgatgggtattggca

SEQ ID NO: 355 - RNA, 84 nt, synthetic construct
  source 1..84: mol_type = other RNA; note = ncRNA
ggttttccgaaccggttgtcgcgcggttcaatccctggtgcgagggccaatacccatcggctccgcactaagaactagaacgac

SEQ ID NO: 356 - RNA, 84 nt, synthetic construct; identical to SEQ ID NO: 355
  source 1..84: mol_type = other RNA; note = ncRNA

SEQ ID NO: 357 - RNA, 84 nt, synthetic construct; identical to SEQ ID NO: 355
  source 1..84: mol_type = other RNA; note = ncRNA

SEQ ID NO: 358 - RNA, 84 nt, synthetic construct
  source 1..84: mol_type = other RNA; note = ncRNA
gttttccgaaccggttgtcgcgcggttcaatccctggtgcggagggccaatacccatcggctccgcactaagaactagaacgac

SEQ ID NO: 359 - RNA, 84 nt, synthetic construct; identical to SEQ ID NO: 358
  source 1..84: mol_type = other RNA; note = ncRNA

SEQ ID NO: 360 - RNA, 84 nt, synthetic construct
  source 1..84: mol_type = other RNA; note = ncRNA
gttttccgaaccggttgtcgcgcggttcaatccctggtgcggtagggccaatacccatcggctccgcactaagaactagaacct

SEQ ID NO: 361 - RNA, 84 nt, synthetic construct; identical to SEQ ID NO: 358
  source 1..84: mol_type = other RNA; note = ncRNA

SEQ ID NO: 362 - RNA, 84 nt, synthetic construct; identical to SEQ ID NO: 358
  source 1..84: mol_type = other RNA; note = ncRNA

SEQ ID NO: 363 - RNA, 84 nt, synthetic construct; identical to SEQ ID NO: 358
  source 1..84: mol_type = other RNA; note = ncRNA

SEQ ID NO: 364 - RNA, 91 nt, synthetic construct
  source 1..91: mol_type = other RNA; note = ncRNA
cytwtccgagcyggttgtcgcncggttcaatycctggtgcgggtgctsgtgccaatacccatcggctccgcactarmyanntmmmmkttwr

SEQ ID NO: 365 - RNA, 33 nt, synthetic construct
  source 1..33: mol_type = other RNA; note = ncRNA
tagtgcggagccgatgggtattggcactagtac

SEQ ID NO: 366 - RNA, 33 nt, synthetic construct
  source 1..33: mol_type = other RNA; note = ncRNA
tagtgcggagccaatgggtattggcactagcac

SEQ ID NO: 367 - RNA, 91 nt, synthetic construct
  source 1..91: mol_type = other RNA; note = ncRNA
cctttccgagccggttgtcgcgcggttcaatccctggtgcgggtgctagtgccaatacccatcggctccgcactaaccaactcccatttag

SEQ ID NO: 368 - RNA, 88 nt, synthetic construct
  source 1..88: mol_type = other RNA; note = ncRNA
cttatccgagctggttgtcgccggttcaattcctggtgcgggtgctagtgccaatacccatcggctccgcactagatataaacgttta

SEQ ID NO: 369 - RNA, 33 nt, synthetic construct; identical to SEQ ID NO: 365
  source 1..33: mol_type = other RNA; note = ncRNA

SEQ ID NO: 370 - RNA, 33 nt, synthetic construct; identical to SEQ ID NO: 366
  source 1..33: mol_type = other RNA; note = ncRNA

SEQ ID NO: 371 - RNA, 88 nt, synthetic construct; identical to SEQ ID NO: 368
  source 1..88: mol_type = other RNA

SEQ ID NO: 372 - RNA, 55 nt, synthetic construct
  source 1..55: mol_type = other RNA; note = ncRNA
ttcgtacgtaagtacgttgtaagtccctcggagatttaaccgggcgcgacattaa

SEQ ID NO: 373 - RNA, 56 nt, synthetic construct
  source 1..56: mol_type = other RNA; note = ncRNA
ttcgtacattagtacgttgttagttcttcgtgaattttaccgggcgggcgacgtcg

SEQ ID NO: 374 - RNA, 52 nt, synthetic construct
  source 1..52: mol_type = other RNA; note = ncRNA
tttgtacgttagtgcgttgtaagtccctcgtggattctcccaggcgtaattc

SEQ ID NO: 375 - RNA, 63 nt, synthetic construct
  source 1..63: mol_type = other RNA; note = ncRNA
ttcgtacgttagtacgttgtaagtcccttgtggattctcccaggcgctacccgcggaacgtat

SEQ ID NO: 376 - RNA, 52 nt, synthetic construct
  source 1..52: mol_type = other RNA; note = ncRNA
ttcgtacgttagtacgttgtaagtcccttgtggattcgcccaggcggcgaca

SEQ ID NO: 377 - RNA, 64 nt, synthetic construct
  source 1..64: mol_type = other RNA; note = ncRNA
ttcgtacggctagtacgttgtaagtctctcgtggattctcccaggcgcctcatagtgattattc

SEQ ID NO: 378 - RNA, 125 nt, synthetic construct
  source 1..125: mol_type = other RNA
gtggtggatcttccatttcttctagtttaagtggaggaaatggtcgactcgccatgatgggtcccggacccttcgtacgtaagtacgttgtaagtccctcggagatttaaccgggcgcgacatta

SEQ ID NO: 379 - RNA, 104 nt, synthetic construct
  source 1..104: mol_type = other RNA; note = ncRNA
tggctttcactctttgagtgtttgcttgcaagatcagcactttgttcgatttgtttgttttgttcaaattgttgatttaaataaaggcgttattgyttatcwaa

SEQ ID NO: 380 - RNA, 104 nt, synthetic construct
  source 1..104: mol_type = other RNA; note = ncRNA
tggctttcactctttgagtgtttgcttgcaagatcagcactttgttcgatttgtttgttttgttcaaattgttgatttaaataaaggcgttacagtatttgaaa

SEQ ID NO: 381 - RNA, 104 nt, synthetic construct
  source 1..104: mol_type = other RNA; note = ncRNA
tggctttcactctttgagtgtttgcttgcaagatcagcactttgttcgatttgtttgttttgttcaaattgttgatttaaataaaggcgacattcttcatctct

SEQ ID NO: 382 - RNA, 104 nt, synthetic construct
  source 1..104: mol_type = other RNA; note = ncRNA
tggctttcactctttgagtgtttgcttgcaagatcagcactttgttcgatttgtttgttttgttcaaattgttgatttaaataaaggcgttgttgcttgtttca

SEQ ID NO: 383 - RNA, 125 nt, synthetic construct
  source 1..125: mol_type = other RNA
tgcgttgggtcctttcccctggctttcactctttgagtgtttgcttgcaagatcagcactttgttcgatttgtttgttttgttcaaattgttgatttaaataaaggcgacattcttcatctctca

SEQ ID NO: 384 - RNA, 111 nt, synthetic construct
  source 1..111: mol_type = other RNA
attcatatctgttaaacgacagatacgacccaaatttttatagcgggtatatttttatgggattagacccccatttgaaatgtcactcgctgtaaatatattctttttatt

SEQ ID NO: 385 - RNA, 88 nt, synthetic construct; identical to SEQ ID NO: 368
  source 1..88: mol_type = other RNA

SEQ ID NO: 386 - RNA, 33 nt, synthetic construct; identical to SEQ ID NO: 365
  source 1..33: mol_type = other RNA

SEQ ID NO: 387 - RNA, 33 nt, synthetic construct; identical to SEQ ID NO: 366
  source 1..33: mol_type = other RNA

SEQ ID NO: 388 - RNA, 88 nt, synthetic construct; identical to SEQ ID NO: 368
  source 1..88: mol_type = other RNA; note = ncRNA

SEQ ID NO: 389 - RNA, 27 nt, synthetic construct
  source 1..27: mol_type = other RNA
aatacatagtgcggagccgatgggtat

SEQ ID NO: 390 - RNA, 27 nt, synthetic construct
  source 1..27: mol_type = other RNA
aatacatagtgcggagccgattggtat

SEQ ID NO: 391 - RNA, 23 nt, synthetic construct
  source 1..23: mol_type = other RNA
tagtgcggagccgatgggtattg

SEQ ID NO: 392 - RNA, 103 nt, synthetic construct
  source 1..103: mol_type = other RNA
gcgttgcctwagtagtagnttagttagcttttccgaaccggttgtcgccggtttattccctggtgtagtagtagtagctagtgcsactcggtatgcaactctc

SEQ ID NO: 393 - RNA, 103 nt, synthetic construct
  source 1..103: mol_type = other RNA
gcgtagaacgtagattggttagattaggttttccgaaccggttgtcgcgcggttcaatccctggtgccgccaatacccatcggctccgcactatgcaactctc

SEQ ID NO: 394 - RNA, 33 nt, synthetic construct; identical to SEQ ID NO: 366
  source 1..33: mol_type = other RNA

SEQ ID NO: 395 - RNA, 33 nt, synthetic construct; identical to SEQ ID NO: 365
  source 1..33: mol_type = other RNA

SEQ ID NO: 396 - RNA, 42 nt, synthetic construct
  source 1..42: mol_type = other RNA
ttgcctagtagtagcttagttagcttttccgaaccggttgtc

SEQ ID NO: 397 - RNA, 41 nt, synthetic construct
  source 1..41: mol_type = other RNA
tgcctagtagtagttagttagcttttccgaaccggttgtcc

SEQ ID NO: 398 - RNA, 42 nt, synthetic construct
  source 1..42: mol_type = other RNA
tgcctagtagtagcttagttagcttttccgaaccggttgtcg

SEQ ID NO: 399 - RNA, 42 nt, synthetic construct
  source 1..42: mol_type = other RNA
gcctagtagtagttagatagcttttccgaaccggttgtcgcc

SEQ ID NO: 400 - RNA, 42 nt, synthetic construct
  source 1..42: mol_type = other RNA
gcctagtagtagctagttagcttttccgaaccggttgtcgcc

SEQ ID NO: 401 - RNA, 42 nt, synthetic construct
  source 1..42: mol_type = other RNA
tagtagtagcttagttggcttttccgaaccggttgtcgccgg

SEQ ID NO: 402 - RNA, 42 nt, synthetic construct
  source 1..42: mol_type = other RNA
agtagtagcttagttggcttttccgaaccggttgtcgccggc

SEQ ID NO: 403 - RNA, 52 nt, synthetic construct
  source 1..52: mol_type = other RNA
gcgtagcatatagcttagcttttccgaaccggttgtcgccggtttattccct

SEQ ID NO: 404 - RNA, 42 nt, synthetic construct; identical to SEQ ID NO: 400
  source 1..42: mol_type = other RNA

SEQ ID NO: 405 - RNA, 42 nt, synthetic construct; identical to SEQ ID NO: 399
  source 1..42: mol_type = other RNA

SEQ ID NO: 406 - RNA, 42 nt, synthetic construct
  source 1..42: mol_type = other RNA
ggatagcttagttagttagcttttccgaaccggttgtcgccg

SEQ ID NO: 407 - RNA, 42 nt, synthetic construct
  source 1..42: mol_type = other RNA
cctagtagtagcttagttagcttttccgaaccggttgtcacc

SEQ ID NO: 408 - RNA, 42 nt, synthetic construct
  source 1..42: mol_type = other RNA
cctagtagtagttagatagcttttccgaaccggttgtcgccg

SEQ ID NO: 409 - RNA, 42 nt, synthetic construct
  source 1..42: mol_type = other RNA
cctagtagtggttagatagcttttccgaaccggttgtcgccg

SEQ ID NO: 410 - RNA, 42 nt, synthetic construct
  source 1..42: mol_type = other RNA
cctagtagtagcttagttagcttttccgaaccggttgtcgcc

SEQ ID NO: 411 - RNA, 42 nt, synthetic construct
  source 1..42: mol_type = other RNA
atcagtagtagttagatagcttttccgaaccggttgtcgcca

SEQ ID NO: 412 - RNA, 42 nt, synthetic construct
  source 1..42: mol_type = other RNA
ctagtagtagcttagttagcttttccgaaccggttgtcgccg

SEQ ID NO: 413 - RNA, 42 nt, synthetic construct
  source 1..42: mol_type = other RNA
tcagtagtagcttagttggcttttccgaaccggttgtcgccg

SEQ ID NO: 414 - RNA, 12 nt, synthetic construct
  source 1..12: mol_type = other RNA
tatgcaactctc

SEQ ID NO: 415 - RNA, 153 nt, unidentified
  source 1..153: mol_type = other RNA; note = Guillardia theta
cactatccggtaacgaaactaccggagacgggrraggaggtgacgacctctaaaacctagaacttagagtgcaaaaacgccattacgattgtgatgcctattcaagggtgtcccaagtgtaaaaagaaagcactctaagagcattaaactcta

SEQ ID NO: 416 - protein, 58 aa, synthetic construct
RNNNNNGSTKYCCMAMRTTWAAAMRSAAASMACTCTAAGAGCAYTAARMTMTAYKCTG

SEQ ID NO: 417 - RNA, 57 nt, unidentified
  source 1..57: mol_type = other RNA; note = Guillardia theta
agcttcgcttcccaacataaaaacgcaaacaactctaagagcactaagatatatgct

SEQ ID NO: 418 - RNA, 52 nt, unidentified
  source 1..52: mol_type = other RNA; note = Guillardia theta
ggtgtcccaagtgtaaaaagaaagcactctaagagcattaaactctactctg

SEQ ID NO: 419 - RNA, 93 nt, Batillaria attramentaria
  source 1..93: mol_type = other RNA
ttttccttggcccaaggattgccaaacaccactcaaatcctcgttcaggggcctcgagtggctgggcatatatgggttagcactgagacttcg

SEQ ID NO: 420 - RNA, 93 nt, Dreissena polymorpha
  source 1..93: mol_type = other RNA
attaggtcgatccatcctaagttcgaaagttgattgctgggcaattttctgccgaatgatatgggttatgacactacgttagtgattgtgtgc

SEQ ID NO: 421 - RNA, 77 nt, Dreissena polymorpha
  source 1..77: mol_type = other RNA
attaggtcgatccatcctaagttcgaaagttgattgctgggcaatttctgccgaatgatatgggttatgacactacg

SEQ ID NO: 422 - RNA, 106 nt, Mercenaria mercenaria
  source 1..106: mol_type = other RNA
agggctcgattctttgccttctcgatgcatttattgccacagattttgctaatgcagtttctgaggcaagaatgtgttcgggtaaaaaagagttaatgggcaaact

SEQ ID NO: 423 - RNA, 111 nt, Mercenaria mercenaria
  source 1..111: mol_type = other RNA
tcgggttcgattcgatccccagggtcgaatgcatttttgtcacagattttgccaatgcaagatctgggggcaagaatgtctccgggtgaaaagagtcaggctggaaagatt

SEQ ID NO: 424 - RNA, 125 nt, Mercenaria mercenaria
  source 1..125: mol_type = other RNA
gttcgattctatcccacttgactcgaagagtcagagggctcgaaggcattatthtcacagattttgccaatgcaagatctggggcaagaatgtctccgggtcaaaagagtcaagctggaaagatt

SEQ ID NO: 425 - RNA, 44 nt, Mercenaria mercenaria
  source 1..44: mol_type = other RNA
gctttyagctattaacacattcgacccgcatgacgtcttttctt

SEQ ID NO: 426 - RNA, 66 nt, Mercenaria mercenaria
  source 1..66: mol_type = other RNA
tcttcgtgttttccctttattagtttgttagttttaacacattcgacccgcatgacgacttttctc

SEQ ID NO: 427 - RNA, 43 nt, Mercenaria mercenaria
  source 1..43: mol_type = other RNA
cttttagctattaacacattcgacccgcatgacgccttttctt

SEQ ID NO: 428 - RNA, 43 nt, Mercenaria mercenaria
  source 1..43: mol_type = other RNA
ctttcagctattaacacattcgacccgcatgacgacttttcta

SEQ ID NO: 429 - RNA, 44 nt, Mercenaria mercenaria
  source 1..44: mol_type = other RNA
cttttagctattaacacattcgaccccgcatgacgccttttctt

SEQ ID NO: 430 - RNA, 41 nt, Mercenaria mercenaria
  source 1..41: mol_type = other RNA
ctngrggcaagaatgtstycgggtgaaaagagtcarkctgg

SEQ ID NO: 431 - RNA, 40 nt, Mercenaria mercenaria
  source 1..40: mol_type = other RNA
ctgaggcaagaatgtgttcgggtaaaaagagttaatgggc

SEQ ID NO: 432 - RNA, 40 nt, Mercenaria mercenaria
  source 1..40: mol_type = other RNA
ctggggcaagaatgtctccgggtcaaaagagtcaagctgg

SEQ ID NO: 433 - RNA, 41 nt, Mercenaria mercenaria
  source 1..41: mol_type = other RNA
ctgggggcaagaatgtctccgggtgaaaagagtcaggctgg

SEQ ID NO: 434 - RNA, 47 nt, Mercenaria mercenaria
  source 1..47: mol_type = other RNA
ccgatgttgtaatcagcatcgcgttgtgacgtaaaagatgggttccg

SEQ ID NO: 435 - RNA, 75 nt, unidentified
  source 1..75: mol_type = other RNA; note = Batrachochytrium salamandrivorans
ataacttatggcgtgtcaacccacgtcgrtatgacgtcgtggggcggtttattatttttgtgtcggcctcaaaat

SEQ ID NO: 436 - RNA, 71 nt, unidentified
  source 1..71: mol_type = other RNA; note = Parasitella parasitica
ttatccaccaaagttatcgctttggtcaattaatgcaggtaagcaacatccagcaaacagagctcgttcaa

SEQ ID NO: 437 - RNA, 86 nt, unidentified
  source 1..86: mol_type = other RNA; note = Parasitella parasitica
cattccgcttgagttatcgcttaagcaatttaatgcaggtaagcaacatccaacaaacagagcctgtccaaaaactaatttctttt

SEQ ID NO: 438 - RNA, 104 nt, unidentified
  source 1..104: mol_type = other RNA; note = Naegleria lovaniensis
tggctttcactctttgagtgtttgcttgcaagatcagcactttgttcgatttgtttgttttgttcaaattgttgatttaaataaaggcgttattgvttatcwaa

SEQ ID NO: 439 - RNA, 104 nt, unidentified; identical to SEQ ID NO: 380
  source 1..104: mol_type = other RNA; note = Naegleria lovaniensis

SEQ ID NO: 440 - RNA, 104 nt, unidentified; identical to SEQ ID NO: 381
  source 1..104: mol_type = other RNA; note = Naegleria lovaniensis

SEQ ID NO: 441 - RNA, 104 nt, unidentified; identical to SEQ ID NO: 382
  source 1..104: mol_type = other RNA; note = Naegleria lovaniensis

SEQ ID NO: 442 - RNA, 127 nt, unidentified
  source 1..127: mol_type = other RNA; note = Naegleria lovaniensis
tgcgttgggtcctttcccctggctttcactctttgagtgtttgcttgcaagatcagcactttgttctatttgtttgttttggttcaaattgttgatttaaataaaggccgacattcttcatctctca

SEQ ID NO: 443 - RNA, 134 nt, synthetic construct
  source 1..134: mol_type = other RNA
gcatgccttcttaaacatcacgagactgtaagaaaaggaaactgaaaacgggaaagtccctctctctaacctggcactgcgtcgctggcttggagacaggtgacggtccctgcgggcttgtcctgattggctgg

SEQ ID NO: 444 - RNA, 136 nt, synthetic construct
  source 1..136: mol_type = other RNA
gcatgccttcttaaacatcaacgagactctaagaaaaggaaactgaaaacgggaaagtccctctctctaacctggcactgcgtcgctggcttggagacaggtgacggtccctgcgggccttgtcctgattggctgg

SEQ ID NO: 445 - RNA, 101 nt, synthetic construct
  source 1..101: mol_type = other RNA
gcatgccttcttaaacatcacgagactctaagaaaaggaaactgaaaacgggaaagtccgccagggtgacggtccctgcgggccttgtcctgattggctgg

SEQ ID NO: 446 - RNA, 113 nt, synthetic construct
  source 1..113: mol_type = other RNA
gcatgccttcttaaacatcacgagactctaagaaaaggaaactgaaaacgggaaagtccctctctgcttggagacaggtgacggtccctgcgggccttgtcctgattggctgg

SEQ ID NO: 447 - RNA, 117 nt, synthetic construct
  source 1..117: mol_type = other RNA
gactgccttcttaaacatcacgagacctctaagaaaaggaaactgaaaacgggaaagtccctctctctaacttggagacaggtgacggtccctgcgggccttgtcctgattggctgg

SEQ ID NO: 448 - RNA, 116 nt, synthetic construct
  source 1..116: mol_type = other RNA
catgccttcttaaacatccgagactctaagaaaaggaaactgaaaacgggaaagtccctctctctaactgttggagacaggtgacggtccctgcgggccttgtcctgattggctgg

SEQ ID NO: 449 - RNA, 117 nt, synthetic construct
  source 1..117: mol_type = other RNA
atgccttcttaaacatcacgagactctaagaaaaggaaactgaaaacgggaaagtccctctctctaacaccttggagacaggtgacggtccctgcgggccttgtcctgattggctgg

SEQ ID NO: 450 - RNA, 123 nt, synthetic construct
  source 1..123: mol_type = other RNA
tgccttcttaaacatcacgagactctaagaaaaggaaactgaaaacgggaaagtccctctctctaaccggcttggagacaggtgacggtccctgcgggccttgtccttgtcctgattggctgg

SEQ ID NO: 451 - RNA, 116 nt, synthetic construct
  source 1..116: mol_type = other RNA
gccttcttaaacatcacgagactctaagaaaaggaaactgaaaacgggaagtccctctctctaacctggcttggagacaggtgacggtccctgcgggccttgtcctgattggctgg

SEQ ID NO: 452 - RNA, 118 nt, synthetic construct
  source 1..118: mol_type = other RNA
ccttcttaaacatcacgagactctaagaaaaggaaactgaaaaacgggaaagtccctctctctaacctgggcttggagacaggtgacggtccctgcgggccttgtcctgattggctgg

SEQ ID NO: 453 - RNA, 117 nt, synthetic construct
  source 1..117: mol_type = other RNA
ccttcttaaacatcacgagactctaagaaaaggaaactgaaaacgggaaagtccctctctctaacggtggcttggagacaggtgacggtccctgcgggccttgtcctgattggctgg

SEQ ID NO: 454 - RNA, 118 nt, synthetic construct
  source 1..118: mol_type = other RNA
cttcttaaacatcacgagactctaagaaaaggaaactgaaaacgggaaagtcccctctctctaacctggcacttggagacaggtgacggtccctgcgggccttgtcctgattggctgg

SEQ ID NO: 455 - RNA, 117 nt, synthetic construct
  source 1..117: mol_type = other RNA
ttcttaaacatcacgagactctaagaaaaggaaactgaaaacgggaaagtccctctctctaacctggtggcttggagacaggtgacggtccctgcgggccttgtcctgattggctgg

SEQ ID NO: 456 - RNA, 117 nt, synthetic construct
  source 1..117: mol_type = other RNA
cttaaacatcacgagactctaagaaaaggaaactgaaaacgggaaagtccctctctctaacctggcacggcttggagacaggtgacggtccctgcgggccttgtcctgattggctgg

SEQ ID NO: 457 - RNA, 118 nt, synthetic construct
  source 1..118: mol_type = other RNA
cttaaacatcacgagactctaagaaaaaggaaactgaaaacgggaaagtccctctctctaacctggcactgcttggagacaggtgacggtccctgcgggccttgtcctgattggctgg

SEQ ID NO: 458 - RNA, 117 nt, synthetic construct
  source 1..117: mol_type = other RNA
ttaaacatcacgagactctaagaaaaggaaactgaaaacgggaaagtccctctctctaacctggcactggcttggagacaggtgacggtccctgcgggccttgtcctgattggctgg

SEQ ID NO: 459 - RNA, 117 nt, synthetic construct; identical to SEQ ID NO: 458
  source 1..117: mol_type = other RNA

SEQ ID NO: 460 - RNA, 117 nt, synthetic construct; identical to SEQ ID NO: 458
  source 1..117: mol_type = other RNA

SEQ ID NO: 461 - RNA, 117 nt, synthetic construct; identical to SEQ ID NO: 458
  source 1..117: mol_type = other RNA

SEQ ID NO: 462 - RNA, 117 nt, synthetic construct
  source 1..117: mol_type = other RNA
taaacatcacgagactctaagaaaaggaaactgaaaacgggaaagtccctctctctaacctggcactgcgtttggagacaggtgacggtccctgcgggccttgtcctgattggctgg

SEQ ID NO: 463 - RNA, 117 nt, synthetic construct
  source 1..117: mol_type = other RNA
taaacatcacgagactctaagaaaaggaaactgaaaacgggaaagtccctctctctaacctggcacttggcttggagacaggtgacggtccctgcgggccttgtcctgattggctgg

SEQ ID NO: 464 - RNA, 116 nt, synthetic construct
  source 1..116: mol_type = other RNA
taaacatcacgagactctaagaaaaggaaactgaaaacgggaaagtccctctctctaacctggcactgcgttggagacaggtgacggtccctgcgggccttgtcctgattggctgg

SEQ ID NO: 465 - RNA, 122 nt, synthetic construct
  source 1..122: mol_type = other RNA
aaacatcacgagactctaagaaaaggaactgaaaacgggaaagtccctctctctaacctggcactgcgtcgctggcttggagacaggtgacggtccctgcgggccttgtcctgattggctgg

SEQ ID NO: 466 - RNA, 117 nt, synthetic construct
  source 1..117: mol_type = other RNA
aaacatcacgagactctaagaaaaggaaactgaaaacgggaaagtccctctctctaacctggcactgcgtcttggagacaggtgacggtccctgcgggccttgtcctgattggctgg

SEQ ID NO: 467 - RNA, 117 nt, synthetic construct
  source 1..117: mol_type = other RNA
aaacatcacgagactctaagaaaaggaaactgaaaacgggaaagtccctctctctaacctggcactgtggcttggagacaggtgacggtccctgcgggccttgtcctgattggctgg

SEQ ID NO: 468 - RNA, 117 nt, synthetic construct; identical to SEQ ID NO: 467
  source 1..117: mol_type = other RNA

SEQ ID NO: 469 - RNA, 117 nt, synthetic construct
  source 1..117: mol_type = other RNA
aaacatcacgagactctaagaaaaggaaactgaaaacgggaagtccctctctctaacctggcgctgcggcttggagacaggtgacggtcccctgcgggccttgtcctgattggctgg

SEQ ID NO: 470 - protein, 30 aa, synthetic construct
SNIRIVKRKAKGFFKCEDLVTIKDAVKAAH

SEQ ID NO: 471 - DNA, 25 bp, synthetic construct
  source 1..25: mol_type = other DNA
aatgacttctcttaaattgcccggg

SEQ ID NO: 472 - RNA, 30 nt, synthetic construct
  source 1..30: mol_type = other RNA
tatccggtaacctaccggagacgggttagg

SEQ ID NO: 473 - DNA, 13 bp, synthetic construct
  source 1..13: mol_type = other DNA
cccgggcatttaa

SEQ ID NO: 474 - protein, 30 aa, synthetic construct
RIMSDASILVRSYYLRWFQSSYPLDSDDKE

SEQ ID NO: 475 - RNA, 30 nt, synthetic construct
  source 1..30: mol_type = other RNA
aggtgacgacctctaaaacctagaacttag

SEQ ID NO: 476 - protein, 30 aa, synthetic construct
LELEHFHISMACSIVQGITRPPVRGVGPEQ

SEQ ID NO: 477 - RNA, 30 nt, synthetic construct
  source 1..30: mol_type = other RNA
agtgcaaaaacgccattacgattgtgatgc

SEQ ID NO: 478 - protein, 30 aa, synthetic construct
SVKIDVFNDMLDEYKRLYERAPNDKENETD

SEQ ID NO: 479 - RNA, 30 nt, synthetic construct
  source 1..30: mol_type = other RNA
ctattcaagggtgtcccaagtgtaaaaaga

SEQ ID NO: 480 - protein, 30 aa, synthetic construct
LSLSHVLAYSIDNLLTAYKNNIEAHFSKYV

SEQ ID NO: 481 - RNA, 23 nt, synthetic construct
  source 1..23: mol_type = other RNA
aagcactctaaggagaagtcatc

SEQ ID NO: 482 - protein, 30 aa, synthetic construct
KRFIRCDMLAKGFNKSEANRVAAIYTNAYI

SEQ ID NO: 483 - protein, 30 aa, synthetic construct
YSSLFPSKINKGGFPRVYDLKANPWVYLPK

SEQ ID NO: 484 - protein, 30 aa, synthetic construct
MVMINQALETDFSSVEHKERRLLNPLPFYS

SEQ ID NO: 485 - protein, 30 aa, synthetic construct
SFVPMHIRIDTSGLSQLLMTKDRLDDFKRS

SEQ ID NO: 486 - protein, 30 aa, synthetic construct
YLAEFGVSLNIKNKGDMLASFEKIFGRKAT

SEQ ID NO: 487 - protein, 30 aa, synthetic construct
SNREAGLYATEMWSFLTNLKTCRQWKELDG

SEQ ID NO: 488 - protein, 30 aa, synthetic construct
VVRKNDPKGTQWMFDNAVVTDGVSISFQVI

SEQ ID NO: 489 - protein, 30 aa, synthetic construct
DNSMFGRKAFSGREELKTSKLLGCDPGKRD

SEQ ID NO: 490 - protein, 30 aa, synthetic construct
ILAITDGIKTICYTKGQRDMDTHKTIRLRT

SEQ ID NO: 491 - protein, 30 aa, synthetic construct
SLKRRRGCGLEEYETQVMNRFQKRSCHPEM

SEQ ID NO: 492 - protein, 29 aa, synthetic construct
FRRYACSRKMEHMLLECYSHPVFREFKFL

SEQ ID NO: 493 - protein, 30 aa, synthetic construct
VYNKTKSSEHRFMHRVLETFKRPQTNLSKA

SEQ ID NO: 494 - protein, 30 aa, synthetic construct
RCASGVMRMNALKEVQRHGDIIIGWGNWGK

SEQ ID NO: 495 - protein, 30 aa, synthetic construct
NIRRRFESLFKTTTVPEHYTSQECPSCKGR

SEQ ID NO: 496 - protein, 30 aa, synthetic construct
CLRKATGNPIMRHHLLRCTNDSCCSRWWNR

SEQ ID NO: 497 - protein, 13 aa, synthetic construct
NVAGAFNILTRLL

SEQ ID NO: 498 - RNA, 12 nt, synthetic construct
  source 1..12: mol_type = other RNA; note = guide RNA
aaacttgtaagg

SEQ ID NO: 499 - RNA, 21 nt, synthetic construct
  source 1..21: mol_type = other RNA; note = guide RNA
agaatctcacgcgtgagattc

SEQ ID NO: 500 - RNA, 55 nt, synthetic construct
  source 1..55: mol_type = other RNA
ttcgtacgttagtacgttgtaagtccctcgtggattctcccaggcgcsacacngn

SEQ ID NO: 501 - protein, 7 aa, Simian virus 40
PKKKRKV

SEQ ID NO: 502 - protein, 16 aa, Simian virus 40
KRPAATKKAGQAKKKK

SEQ ID NO: 503 - protein, 9 aa, Homo sapiens
PAAKRVKLD

SEQ ID NO: 504 - protein, 11 aa, Homo sapiens
RQRRNELKRSP

SEQ ID NO: 505 - protein, 38 aa, Homo sapiens
NQSSNFGPMKGGNFGGRSSGPYGGGGQYFAKPRNQGGY

SEQ ID NO: 506 - protein, 41 aa, Homo sapiens
RMRIZFKNKGKDTAELRRRRVEVSVELRKAKKDEQILKRRN

SEQ ID NO: 507 - protein, 8 aa, Homo sapiens
VSRKRPRP

SEQ ID NO: 508 - protein, 8 aa, Homo sapiens
PPKKARED

SEQ ID NO: 509 - protein, 12 aa, Mus sp.
SALIKKKKKMAP

SEQ ID NO: 510 - protein, 5 aa, Influenza virus
DRLRR

SEQ ID NO: 511 - protein, 7 aa, Influenza virus
PKQKKRK

SEQ ID NO: 512 - protein, 10 aa, Hepatitis D virus
RKLKKKIKKL

SEQ ID NO: 513 - protein, 10 aa, Mus sp.
REKKKFLKRR

SEQ ID NO: 514 - protein, 20 aa, Homo sapiens
KRKGDEVDGVDEVAKKKSKK

SEQ ID NO: 515 - protein, 17 aa, Homo sapiens
RKCLQAGMNLEARKTKK

SEQ ID NO: 516 - protein, 4 aa, synthetic construct
  source 1..4: note = GlySer linker
GGGS

SEQ ID NO: 517 - protein, 5 aa, synthetic construct
  source 1..5: note = GlySer linker
GGGGS

SEQ ID NO: 518 - protein, 9 aa, synthetic construct
  source 1..9: note = GlySer linker
GGSGGSGGS

SEQ ID NO: 519 - protein, 15 aa, synthetic construct
  source 1..15: note = GlySer linker
GGGGSGGGGSGGGGS

SEQ ID NO: 520 - protein, 20 aa, synthetic construct
  source 1..20: note = GlySer linker
GGGGSGGGGSGGGGSGGGGS

SEQ ID NO: 521 - protein, 25 aa, synthetic construct
  source 1..25: note = GlySer linker
GGGGSGGGGSGGGGSGGGGSGGGGS

SEQ ID NO: 522 - protein, 30 aa, synthetic construct
  source 1..30: note = GlySer linker
GGGGSGGGGSGGGGSGGGGSGGGGSGGGGS

SEQ ID NO: 523 - protein, 35 aa, synthetic construct
  source 1..35: note = GlySer linker
GGGGSGGGGSGGGGSGGGGSGGGGSGGGGSGGGGS

SEQ ID NO: 524 - protein, 40 aa, synthetic construct
  source 1..40: note = GlySer linker
GGGGSGGGGSGGGGSGGGGSGGGGSGGGGSGGGGSGGGGS

SEQ ID NO: 525 - protein, 45 aa, synthetic construct
  source 1..45: note = GlySer linker
GGGGSGGGGSGGGGSGGGGSGGGGSGGGGSGGGGSGGGGSGGGGS

SEQ ID NO: 526 - protein, 50 aa, synthetic construct
  source 1..50: note = GlySer linker
GGGGSGGGGSGGGGSGGGGSGGGGSGGGGSGGGGSGGGGSGGGGSGGGGS

SEQ ID NO: 527 - protein, 55 aa, synthetic construct
  source 1..55: note = GlySer linker
GGGGSGGGGSGGGGSGGGGSGGGGSGGGGSGGGGSGGGGSGGGGSGGGGSGGGGS

SEQ ID NO: 528 - protein, 60 aa, synthetic construct
  source 1..60: note = GlySer linker
GGGGSGGGGSGGGGSGGGGSGGGGSGGGGSGGGGSGGGGSGGGGSGGGGSGGGGSGGGGS

SEQ ID NO: 529 - protein, 65 aa, synthetic construct
  source 1..65: note = GlySer linker
GGGGSGGGGSGGGGSGGGGSGGGGSGGGGSGGGGSGGGGSGGGGSGGGGSGGGGSGGGGSGGGGS

SEQ ID NO: 530 - protein, 70 aa, synthetic construct
  source 1..70: note = GlySer linker
GGGGSGGGGSGGGGSGGGGSGGGGSGGGGSGGGGSGGGGSGGGGSGGGGSGGGGSGGGGSGGGGSGGGGS

SEQ ID NO: 531 - protein, 75 aa, synthetic construct
  source 1..75: note = GlySer linker
GGGGSGGGGSGGGGSGGGGSGGGGSGGGGSGGGGSGGGGSGGGGSGGGGSGGGGSGGGGSGGGGSGGGGSGGGGS

SEQ ID NO: 532 - protein, 10 aa, synthetic construct
  source 1..10: note = GlySer linker
GGGGSGGGGS

SEQ ID NO: 533 - protein, 32 aa, synthetic construct
LEPGEKPYKCPECGKSFSQSGALTRHQRTHTR

SEQ ID NO: 534 - protein, 20 aa, synthetic construct
PKKKRKVEASSPKKRKVEAS

SEQ ID NO: 535 - protein, 9 aa, synthetic construct
  source 1..9: note = GlySer linker
GGSGGSGGS

SEQ ID NO: 536 - DNA, 27 bp, synthetic construct
  source 1..27: mol_type = other DNA
ggtggtagtggagggagcggcggttca

SEQ ID NO: 537 - protein, 21 aa, synthetic construct
  source 1..21: note = GlySer linker
GGSGGSGGSGGSGGSGGSGGS

SEQ ID NO: 538 - DNA, 72 bp, synthetic construct
  source 1..72: mol_type = other DNA
ggtggaggaggctctggtggaggcggtagcggaggcggagggtcgggtggtagtggagggagcggcggttca

SEQ ID NO: 539 - DNA, 48 bp, synthetic construct
  source 1..48: mol_type = other DNA
tcgggatctgagacgcctgggacctcggaatcggctacgcccgaaagt

SEQ ID NO: 540 - DNA, 192 bp, synthetic construct
  source 1..192: mol_type = other DNA
gtggataacaaatttaacaaagaaatgtgggcggcgtgggaagaaattcgtaacctgccgaacctgaacggctggcagatgaccgcgtttattgcgagcctggtggatgatccgagccagagcgcgaacctgctggcggaagcgaaaaaactgaacgatgcgcaggcgccgaaaaccggcggtggttctggt

SEQ ID NO: 541 - DNA, 108 bp, synthetic construct
  source 1..108: mol_type = other DNA
ggtggttctgccggtggctccggttctggctccagcggtggcagctctggtgcgtccggcacgggtactgcgggtggcactggcagcggttccggtactggctctggc

SEQ ID NO: 542 - DNA, 12 bp, synthetic construct
  source 1..12: mol_type = other DNA
acttgtttaagt

SEQ ID NO: 543 - protein, 229 aa, Rattus sp. [sequence omitted]

SEQ ID NO: 544 - protein, 236 aa, Homo sapiens
MTSEKGPSTGDPTLRRRIEPWEFDVFYDPRELRKEACLLYEIKWGMSRKIWRSSGKNTTNHVEVNFIKKFTSERDFHPSMSCSITWFLSWSPCWECSQAIREFLSRHPGVTLVIYVARLFWHMDQQNRQGLRDLVNSGVTIQIMRASEYYHCWRNFVNYPPGDEAHWPQYPPLWMMLYALELHCIILSLPPCLKISRRWQNHLTFFRLHLQNCHYQTIPPHILLATGLIHPSVAWR

SEQ ID NO: 545 - protein, 325 aa, Homo sapiens
MELKYHPEMRFFHWFSKWRKLHRDQEYEVTWYISWSPCTKCTRDMATFLAEDPKVTLTIFVARLYYFWDPDYQEALRSLCQKRDGPRATMKIMNYDEFQHCWSKFVYSQRELFEPWNNLPKYYILLHIMLGEILRHSMDPPTFTFNFNNEPWVRGRHETYLCYEVERMHNDTWVLLNQRRGFLCNQAPHKHGFLEGRHAELCFLDVIPFWKLDLDQDYRVTCFTSWSPCFSCAQEMAKFISKNKHVSLCIFTARIYDDQGRCQEGLRTLAEAGAKISIMTYSEFKHCWDTFVDHQGCPFQPWDGLDEHSQDLSGRLRAILQNQEN

SEQ ID NO: 546 - protein, 208 aa, Petromyzon marinus
MTDAEYVRIHEKLDIYTFKKQFFNNKKSVSHRCYVLFELKRRGERRACFWGYAVNKPQSGTERGIHAEIFSIRKVEEYLRDNPGQFTINWYSSWSPCADCAEKILEWYNQELRGNGHTLKIWACKLYYEKNARNQIGLWNLRDNGVGLNVMVSEHYQCCRKIFIQSSHNQLNENRWLEKTLKRAEKRRSELSIMIQVKILHTTKSPAV

SEQ ID NO: 547 - protein, 200 aa, Homo sapiens
MDSLLMNRRKFLYQFKNVRWAKGRRETYLCYVVKRRDSATSFSLDFGYLRNKNGCHVELLFLRYISDWDLDPGRCYRVTWFTSWSPCYDCARHVADFLRGNPYLSLRIFTARLYFCEDRKAEPEGLRRLHRAGVQIAIMTFKDYFYCWNTFVENHERTFKAWEGLHENSVRLSRQLRRILLPLYEVDDLRDAFRTLGLLD

SEQ ID NO: 548 - protein, 181 aa, Homo sapiens
MDSLLMNRRKFLYQFKNVRWAKGRRETYLCYVVKRRDSATSFSLDFGYLRNKNGCHVELLFLRYISDWDLDPGRCYRVTWFTSWSPCYDCARHVADFLRGNPNLSLRIFTARLYFCEDRKAEPEGLRRLHRAGVQIAIMTFKDYFYCWNTFVENHERTFKAWEGLHENSVRLSRQLRRILL

SEQ ID NO: 549 - protein, 9 aa, synthetic construct
IEVMYPPPY

SEQ ID NO: 550 - RNA, 25 nt, synthetic construct
  source 1..25: mol_type = other RNA; note = thrombin inhibitor aptamer
gggaacaaagctgaagtacttaccc

SEQ ID NO: 551 - DNA, 18 bp, synthetic construct
  source 1..18: mol_type = other DNA
gggtagggcgggttggga

SEQ ID NO: 552 - RNA, 12 nt, synthetic construct
  source 1..12: mol_type = other RNA
  misc_feature 1: note = Biotin Tag = /5Biosg/
  misc_feature 12: note = Iowa black quencher=/3IAbRQSp/
tctcgtacgttc

SEQ ID NO: 553 - RNA, 24 nt, synthetic construct
  source 1..24: mol_type = other RNA
  misc_feature 1: note = Biotin Tag = /5Biosg/
  misc_feature 24: note = Iowa black quencher = /3IAbRQS/
tctcgtacgttctctcgtacgttc

SEQ ID NO: 554 - DNA, 3008 bp, synthetic construct
  source 1..3008: mol_type = other DNA; note = plasmid construct
aattctgtggaatgtgtgtcagttagggtgtggaaagtccccaggctccccagcaggcagaagtatgcaaagcatgcatctcaattagtcagcaaccaggtgtggaaagtccccaggctccccagcaggcagaagtatgcaaagcatgcatctcaattagtcagcaaccatagtcccgcccctaactccgcccatcccgcccctaactccgcccagttccgcccattctccgccccatggctgactaattttttttatttatgcagaggccgaggccgcctctgcctctgagctattccagaagtagtgaggaggcttttttggaggcctaggcttttgcaaaaagctaacttgtttattgcagcttataatggttacaaataaagcaatagcatcacaaatttcacaaataaagcatttttttcactgcattctagttgtggtttgtccaaactcatcaatgtatcttatcatgtctgtataccgtcgacctctagctagagcttggcgtaatcatggtcatagctgtttcctgtgtgaaattgttatccgctcacaattccacacaacatacgagccggaagcataaagtgtaaagcctggggtgcctaatgagtgagctaactcacattaattgcgttgcgctcactgcccgctttccagtcgggaaacctgtcgtgccagctgcattaatgaatcggccaacgcgcggggagaggcggtttgcgtattgggcgctcttccgcttcctcgctcactgactcgctgcgctcggtcgttcggctgcggcgagcggtatcagctcactcaaaggcggtaatacggttatccacagaatcaggggataacgcaggaaagaacatgtgagcaaaaggccagcaaaaggccaggaaccgtaaaaaggccgcgttgctggcgtttttccataggctccgcccccctgacgagcatcacaaaaatcgacgctcaagtcagaggtggcgaaacccgacaggactataaagataccaggcgtttccccctggaagctccctcgtgcgctctcctgttccgaccctgccgcttaccggatacctgtccgcctttctcccttcgggaagcgtggcgctttctcatagctcacgctgtaggtatctcagttcggtgtaggtcgttcgctccaagctgggctgtgtgcacgaaccccccgttcagcccgaccgctgcgccttatccggtaactatcgtcttgagtccaacccggtaagacacgacttatcgccactggcagcagccactggtaacaggattagcagagcgaggtatgtaggcggtgctacagagttcttgaagtggtggcctaactacggctacactagaagaacagtatttggtatctgcgctctgctgaagccagttaccttcggaaaaagagttggtagctcttgatccggcaaacaaaccaccgctggtagcggtttttttgtttgcaagcagcagattacgcgcagaaaaaaaggatctcaagaagatcctttgatcttttctacggggtctgacgctcagtggaacgaaaactcacgttaagggattttggtcatgagattatcaaaaaggatcttcacctagatccttttaaattaaaaatgaagttttaaatcaatctaaagtatatatgagtaaacttggtctgacagttaccaatgcttaatcagtgaggcacctatctcagcgatctgtctatttcgttcatccatagttgcctgactccccgtcgtgtagataactacgatacgggagggcttaccatctggccccagtgctgcaatgataccgcgagacccacgctcaccggctccagatttatcagcaataaaccagccagccggaagggccgagcgcagaagtggtcctgcaactttatccgcctccatccagtctattaattgttgccgggaagctagagtaagtagttcgccagttaatagtttgcgcaacgttgttgccattgctacaggcatcgtggtgtcacgctcgtcgtttggtatggcttcattcagctccggttcccaacgatcaaggcgagttacatgatcccccatgttgtgcaaaaaagcggttagctccttcggtcctccgatcgttgtcagaagtaagttggccgcagtgttatcactcatggttatggcagcactgcataattctcttactgtcatgccatccgtaagatgcttttctgtgactggtgagtactcaaccaagtcattctgagaatagtgtatgcggcgaccgagttgctcttgcccggcgtcaatacgggataataccgcgccacatagcagaactttaaaagtgctcatcattggaaaacgttcttcggggcgaaaactctcaaggatcttaccgctgttgagatccagttcgatgtaacccactcgtgcacccaactgatcttcagcatcttttactttcaccagcgtttctgggtgagcaaaaacaggaaggcaaaatgccgcaaaaaagggaataagggcgacacggaaatgttgaatactcatactcttcctttttcaatattattgaagcatttatcagggttattgtctcatgagcggatacatatttgaatgtatttagaaaaataaacaaataggggttccgcgcacatttccccgaaaagtgccacctgagggcctatttcccatgattccttcatatttgcatatacgatacaaggctgttagagagataattagaattaatttgactgtaaacacaaagatattagtacaaaatacgtgacgtagaaagtaataatttcttgggtagtttgcagttttaaaattatgttttaaaatggactatcatatgcttaccgtaacttgaaagtatttcgatttcttggctttatatatcttgtggaaaggacgttttccgagccggttgtcgcgcggttcaatccctggtgcgggtgctagtgccaatacccaccggctccgcactacagtcttctctgaagaccatttttt

SEQ ID NO: 555 - RNA, 75 nt, synthetic construct
  source 1..75: mol_type = other RNA
gttttccgagccggttgtcgcgcggttcaatccctggtgcgggtgctagtgccaatacccaccggctccgcacta

SEQ ID NO: 556 - DNA, 3076 bp, synthetic construct
  source 1..3076: mol_type = other DNA; note = plasmid construct
aattctgtggaatgtgtgtcagttagggtgtggaaagtccccaggctccccagcaggcagaagtatgcaaagcatgcatctcaattagtcagcaaccaggtgtggaaagtccccaggctccccagcaggcagaagtatgcaaagcatgcatctcaattagtcagcaaccatagtcccgcccctaactccgcccatcccgcccctaactccgcccagttccgcccattctccgccccatggctgactaattttttttatttatgcagaggccgaggccgcctctgcctctgagctattccagaagtagtgaggaggcttttttggaggcctaggcttttgcaaaaagctaacttgtttattgcagcttataatggttacaaataaagcaatagcatcacaaatttcacaaataaagcatttttttcactgcattctagttgtggtttgtccaaactcatcaatgtatcttatcatgtctgtataccgtcgacctctagctagagcttggcgtaatcatggtcatagctgtttcctgtgtgaaattgttatccgctcacaattccacacaacatacgagccggaagcataaagtgtaaagcctggggtgcctaatgagtgagctaactcacattaattgcgttgcgctcactgcccgctttccagtcgggaaacctgtcgtgccagctgcattaatgaatcggccaacgcgcggggagaggcggtttgcgtattgggcgctcttccgcttcctcgctcactgactcgctgcgctcggtcgttcggctgcggcgagcggtatcagctcactcaaaggcggtaatacggttatccacagaatcaggggataacgcaggaaagaacatgtgagcaaaaggccagcaaaaggccaggaaccgtaaaaaggccgcgttgctggcgtttttccataggctccgcccccctgacgagcatcacaaaaatcgacgctcaagtcagaggtggcgaaacccgacaggactataaagataccaggcgtttccccctggaagctccctcgtgcgctctcctgttccgaccctgccgcttaccggatacctgtccgcctttctcccttcgggaagcgtggcgctttctcatagctcacgctgtaggtatctcagttcggtgtaggtcgttcgctccaagctgggctgtgtgcacgaaccccccgttcagcccgaccgctgcgccttatccggtaactatcgtcttgagtccaacccggtaagacacgacttatcgccactggcagcagccactggtaacaggattagcagagcgaggtatgtaggcggtgctacagagttcttgaagtggtggcctaactacggctacactagaagaacagtatttggtatctgcgctctgctgaagccagttaccttcggaaaaagagttggtagctcttgatccggcaaacaaaccaccgctggtagcggtttttttgtttgcaagcagcagattacgcgcagaaaaaaaggatctcaagaagatcctttgatcttttctacggggtctgacgctcagtggaacgaaaactcacgttaagggattttggtcatgagattatcaaaaaggatcttcacctagatccttttaaattaaaaatgaagttttaaatcaatctaaagtatatatgagtaaacttggtctgacagttaccaatgcttaatcagtgaggcacctatctcagcgatctgtctatttcgttcatccatagttgcctgactccccgtcgtgtagataactacgatacgggagggcttaccatctggccccagtgctgcaatgataccgcgagacccacgctcaccggctccagatttatcagcaataaaccagccagccggaagggccgagcgcagaagtggtcctgcaactttatccgcctccatccagtctattaattgttgccgggaagctagagtaagtagttcgccagttaatagtttgcgcaacgttgttgccattgctacaggcatcgtggtgtcacgctcgtcgtttggtatggcttcattcagctccggttcccaacgatcaaggcgagttacatgatcccccatgttgtgcaaaaaagcggttagctccttcggtcctccgatcgttgtcagaagtaagttggccgcagtgttatcactcatggttatggcagcactgcataattctcttactgtcatgccatccgtaagatgcttttctgtgactggtgagtactcaaccaagtcattctgagaatagtgtatgcggcgaccgagttgctcttgcccggcgtcaatacgggataataccgcgccacatagcagaactttaaaagtgctcatcattggaaaacgttcttcggggcgaaaactctcaaggatcttaccgctgttgagatccagttcgatgtaacccactcgtgcacccaactgatcttcagcatcttttactttcaccagcgtttctgggtgagcaaaaacaggaaggcaaaatgccgcaaaaaagggaataagggcgacacggaaatgttgaatactcatactcttcctttttcaatattattgaagcatttatcagggttattgtctcatgagcggatacatatttgaatgtatttagaaaaataaacaaataggggttccgcgcacatttccccgaaaagtgccacctgagggcctatttcccatgattccttcatatttgcatatacgatacaaggctgttagagagataattagaattaatttgactgtaaacacaaagatattagtacaaaatacgtgacgtagaaagtaataatttcttgggtagtttgcagttttaaaattatgttttaaaatggactatcatatgcttaccgtaacttgaaagtatttcgatttcttggctttatatatcttgtggaaaggacgttttccgagccggttgtcgcgcggttcaatccctggtgcgggtgctagtgccaatacccaccggctccgcactacagtcttctctgaagaccaggccggcatggtcccagcctcctcgctggcgccggctgggcaacatgcttcggcatggcgaatgggactttttt

SEQ ID NO: 557 - RNA, 75 nt, synthetic construct; identical to SEQ ID NO: 555
  source 1..75: mol_type = other RNA

SEQ ID NO: 558 - DNA, 3095 bp, synthetic construct
  source 1..3095: mol_type = other DNA; note = plasmid construct
aattctgtggaatgtgtgtcagttagggtgtggaaagtccccaggctccccagcaggcagaagtatgcaaagcatgcatctcaattagtcagcaaccaggtgtggaaagtccccaggctccccagcaggcagaagtatgcaaagcatgcatctcaattagtcagcaaccatagtcccgcccctaactccgcccatcccgcccctaactccgcccagttccgcccattctccgccccatggctgactaattttttttatttatgcagaggccgaggccgcctctgcctctgagctattccagaagtagtgaggaggcttttttggaggcctaggcttttgcaaaaagctaacttgtttattgcagcttataatggttacaaataaagcaatagcatcacaaatttcacaaataaagcatttttttcactgcattctagttgtggtttgtccaaactcatcaatgtatcttatcatgtctgtataccgtcgacctctagctagagcttggcgtaatcatggtcatagctgtttcctgtgtgaaattgttatccgctcacaattccacacaacatacgagccggaagcataaagtgtaaagcctggggtgcctaatgagtgagctaactcacattaattgcgttgcgctcactgcccgctttccagtcgggaaacctgtcgtgccagctgcattaatgaatcggccaacgcgcggggagaggcggtttgcgtattgggcgctcttccgcttcctcgctcactgactcgctgcgctcggtcgttcggctgcggcgagcggtatcagctcactcaaaggcggtaatacggttatccacagaatcaggggataacgcaggaaagaacatgtgagcaaaaggccagcaaaaggccaggaaccgtaaaaaggccgcgttgctggcgtttttccataggctccgcccccctgacgagcatcacaaaaatcgacgctcaagtcagaggtggcgaaacccgacaggactataaagataccaggcgtttccccctggaagctccctcgtgcgctctcctgttccgaccctgccgcttaccggatacctgtccgcctttctcccttcgggaagcgtggcgctttctcatagctcacgctgtaggtatctcagttcggtgtaggtcgttcgctccaagctgggctgtgtgcacgaaccccccgttcagcccgaccgctgcgccttatccggtaactatcgtcttgagtccaacccggtaagacacgacttatcgccactggcagcagccactggtaacaggattagcagagcgaggtatgtaggcggtgctacagagttcttgaagtggtggcctaactacggctacactagaagaacagtatttggtatctgcgctctgctgaagccagttaccttcggaaaaagagttggtagctcttgatccggcaaacaaaccaccgctggtagcggtttttttgtttgcaagcagcagattacgcgcagaaaaaaaggatctcaagaagatcctttgatcttttctacggggtctgacgctcagtggaacgaaaactcacgttaagggattttggtcatgagattatcaaaaaggatcttcacctagatccttttaaattaaaaatgaagttttaaatcaatctaaagtatatatgagtaaacttggtctgacagttaccaatgcttaatcagtgaggcacctatctcagcgatctgtctatttcgttcatccatagttgcctgactccccgtcgtgtagataactacgatacgggagggcttaccatctggccccagtgctgcaatgataccgcgagacccacgctcaccggctccagatttatcagcaataaaccagccagccggaagggccgagcgcagaagtggtcctgcaactttatccgcctccatccagtctattaattgttgccgggaagctagagtaagtagttcgccagttaatagtttgcgcaacgttgttgccattgctacaggcatcgtggtgtcacgctcgtcgtttggtatggcttcattcagctccggttcccaacgatcaaggcgagttacatgatcccccatgttgtgcaaaaaagcggttagctccttcggtcctccgatcgttgtcagaagtaagttggccgcagtgttatcactcatggttatggcagcactgcataattctcttactgtcatgccatccgtaagatgcttttctgtgactggtgagtactcaaccaagtcattctgagaatagtgtatgcggcgaccgagttgctcttgcccggcgtcaatacgggataataccgcgccacatagcagaactttaaaagtgctcatcattggaaaacgttcttcggggcgaaaactctcaaggatcttaccgctgttgagatccagttcgatgtaacccactcgtgcacccaactgatcttcagcatcttttactttcaccagcgtttctgggtgagcaaaaacaggaaggcaaaatgccgcaaaaaagggaataagggcgacacggaaatgttgaatactcatactcttcctttttcaatattattgaagcatttatcagggttattgtctcatgagcggatacatatttgaatgtatttagaaaaataaacaaataggggttccgcgcacatttccccgaaaagtgccacctgagggcctatttcccatgattccttcatatttgcatatacgatacaaggctgttagagagataattagaattaatttgactgtaaacacaaagatattagtacaaaatacgtgacgtagaaagtaataatttcttgggtagtttgcagttttaaaattatgttttaaaatggactatcatatgcttaccgtaacttgaaagtatttcgatttcttggctttatatatcttgtggaaaggacagatcaatgttggatggacacggtagaccagaagtgttcagcaggagtgttccagccgtagcgtagaacgtagattggttagattaggttttccgagccggttgtcgcgcggttcaatccctggtgcgggtgctagtgccaatacccaccggctccgcactacagtcttctctgaagaccatttttt

SEQ ID NO: 559 - RNA, 162 nt, synthetic construct
  source 1..162: mol_type = other RNA
agatcaatgttggatggacacggtagaccagaagtgttcagcaggagtgttccagccgtagcgtagaacgtagattggttagattaggttttccgagccggttgtcgcgcggttcaatccctggtgcgggtgctagtgccaatacccaccggctccgcacta

SEQ ID NO: 560 - DNA, 3134 bp, synthetic construct
  source 1..3134: mol_type = other DNA; note = plasmid construct
aattctgtggaatgtgtgtcagttagggtgtggaaagtccccaggctccccagcaggcagaagtatgcaaagcatgcatctcaattagtcagcaaccaggtgtggaaagtccccaggctccccagcaggcagaagtatgcaaagcatgcatctcaattagtcagcaaccatagtcccgcccctaactccgcccatcccgcccctaactccgcccagttccgcccattctccgccccatggctgactaattttttttatttatgcagaggccgaggccgcctctgcctctgagctattccagaagtagtgaggaggcttttttggaggcctaggcttttgcaaaaagctaacttgtttattgcagcttataatggttacaaataaagcaatagcatcacaaatttcacaaataaagcatttttttcactgcattctagttgtggtttgtccaaactcatcaatgtatcttatcatgtctgtataccgtcgacctctagctagagcttggcgtaatcatggtcatagctgtttcctgtgtgaaattgttatccgctcacaattccacacaacatacgagccggaagcataaagtgtaaagcctggggtgcctaatgagtgagctaactcacattaattgcgttgcgctcactgcccgctttccagtcgggaaacctgtcgtgccagctgcattaatgaatcggccaacgcgcggggagaggcggtttgcgtattgggcgctcttccgcttcctcgctcactgactcgctgcgctcggtcgttcggctgcggcgagcggtatcagctcactcaaaggcggtaatacggttatccacagaatcaggggataacgcaggaaagaacatgtgagcaaaaggccagcaaaaggccaggaaccgtaaaaaggccgcgttgctggcgtttttccataggctccgcccccctgacgagcatcacaaaaatcgacgctcaagtcagaggtggcgaaacccgacaggactataaagataccaggcgtttccccctggaagctccctcgtgcgctctcctgttccgaccctgccgcttaccggatacctgtccgcctttctcccttcgggaagcgtggcgctttctcatagctcacgctgtaggtatctcagttcggtgtaggtcgttcgctccaagctgggctgtgtgcacgaaccccccgttcagcccgaccgctgcgccttatccggtaactatcgtcttgagtccaacccggtaagacacgacttatcgccactggcagcagccactggtaacaggattagcagagcgaggtatgtaggcggtgctacagagttcttgaagtggtggcctaactacggctacactagaagaacagtatttggtatctgcgctctgctgaagccagttaccttcggaaaaagagttggtagctcttgatccggcaaacaaaccaccgctggtagcggtttttttgtttgcaagcagcagattacgcgcagaaaaaaaggatctcaagaagatcctttgatcttttctacggggtctgacgctcagtggaacgaaaactcacgttaagggattttggtcatgagattatcaaaaaggatcttcacctagatccttttaaattaaaaatgaagttttaaatcaatctaaagtatatatgagtaaacttggtctgacagttaccaatgcttaatcagtgaggcacctatctcagcgatctgtctatttcgttcatccatagttgcctgactccccgtcgtgtagataactacgatacgggagggcttaccatctggccccagtgctgcaatgataccgcgagacccacgctcaccggctccagatttatcagcaataaaccagccagccggaagggccgagcgcagaagtggtcctgcaactttatccgcctccatccagtctattaattgttgccgggaagctagagtaagtagttcgccagttaatagtttgcgcaacgttgttgccattgctacaggcatcgtggtgtcacgctcgtcgtttggtatggcttcattcagctccggttcccaacgatcaaggcgagttacatgatcccccatgttgtgcaaaaaagcggttagctccttcggtcctccgatcgttgtcagaagtaagttggccgcagtgttatcactcatggttatggcagcactgcataattctcttactgtcatgccatccgtaagatgcttttctgtgactggtgagtactcaaccaagtcattctgagaatagtgtatgcggcgaccgagttgctcttgcccggcgtcaatacgggataataccgcgccacatagcagaactttaaaagtgctcatcattggaaaacgttcttcggggcgaaaactctcaaggatcttaccgctgttgagatccagttcgatgtaacccactcgtgcacccaactgatcttcagcatcttttactttcaccagcgtttctgggtgagcaaaaacaggaaggcaaaatgccgcaaaaaagggaataagggcgacacggaaatgttgaatactcatactcttcctttttcaatattattgaagcatttatcagggttattgtctcatgagcggatacatatttgaatgtatttagaaaaataaacaaataggggttccgcgcacatttccccgaaaagtgccacctgagggcctatttcccatgattccttcatatttgcatatacgatacaaggctgttagagagataattagaattaatttgactgtaaacacaaagatattagtacaaaatacgtgacgtagaaagtaataatttcttgggtagtttgcagttttaaaattatgttttaaaatggactatcatatgcttaccgtaacttgaaagtatttcgatttcttggctttatatatcttgtggaaaggaccgagatatgctgtcaacctgcaacatgctattgattgtgagatcaatgttggatggacacggtagaccagaagtgttcagcaggagtgttccagccgtagcgtagaacgtagattggttagattaggttttccgagccggttgtcgcgcggttcaatccctggtgcgggtgctagtgccaatacccaccggctccgcactacagtcttctctgaagaccatttttt

SEQ ID NO: 561 - RNA, 201 nt, synthetic construct
  source 1..201: mol_type = other RNA
cgagatatgctgtcaacctgcaacatgctattgattgtgagatcaatgttggatggacacggtagaccagaagtgttcagcaggagtgttccagccgtagcgtagaacgtagattggttagattaggttttccgagccggttgtcgcgcggttcaatccctggtgcgggtgctagtgccaatacccaccggctccgcacta

SEQ ID NO: 562 - DNA, 3209 bp, synthetic construct
  source 1..3209: mol_type = other DNA; note = plasmid construct
aattctgtggaatgtgtgtcagttagggtgtggaaagtccccaggctccccagcaggcagaagtatgcaaagcatgcatctcaattagtcagcaaccaggtgtggaaagtccccaggctccccagcaggcagaagtatgcaaagcatgcatctcaattagtcagcaaccatagtcccgcccctaactccgcccatcccgcccctaactccgcccagttccgcccattctccgccccatggctgactaattttttttatttatgcagaggccgaggccgcctctgcctctgagctattccagaagtagtgaggaggcttttttggaggcctaggcttttgcaaaaagctaacttgtttattgcagcttataatggttacaaataaagcaatagcatcacaaatttcacaaataaagcatttttttcactgcattctagttgtggtttgtccaaactcatcaatgtatcttatcatgtctgtataccgtcgacctctagctagagcttggcgtaatcatggtcatagctgtttcctgtgtgaaattgttatccgctcacaattccacacaacatacgagccggaagcataaagtgtaaagcctggggtgcctaatgagtgagctaactcacattaattgcgttgcgctcactgcccgctttccagtcgggaaacctgtcgtgccagctgcattaatgaatcggccaacgcgcggggagaggcggtttgcgtattgggcgctcttccgcttcctcgctcactgactcgctgcgctcggtcgttcggctgcggcgagcggtatcagctcactcaaaggcggtaatacggttatccacagaatcaggggataacgcaggaaagaacatgtgagcaaaaggccagcaaaaggccaggaaccgtaaaaaggccgcgttgctggcgtttttccataggctccgcccccctgacgagcatcacaaaaatcgacgctcaagtcagaggtggcgaaacccgacaggactataaagataccaggcgtttccccctggaagctccctcgtgcgctctcctgttccgaccctgccgcttaccggatacctgtccgcctttctcccttcgggaagcgtggcgctttctcatagctcacgctgtaggtatctcagttcggtgtaggtcgttcgctccaagctgggctgtgtgcacgaaccccccgttcagcccgaccgctgcgccttatccggtaactatcgtcttgagtccaacccggtaagacacgacttatcgccactggcagcagccactggtaacaggattagcagagcgaggtatgtaggcggtgctacagagttcttgaagtggtggcctaactacggctacactagaagaacagtatttggtatctgcgctctgctgaagccagttaccttcggaaaaagagttggtagctcttgatccggcaaacaaaccaccgctggtagcggtttttttgtttgcaagcagcagattacgcgcagaaaaaaaggatctcaagaagatcctttgatcttttctacggggtctgacgctcagtggaacgaaaactcacgttaagggattttggtcatgagattatcaaaaaggatcttcacctagatccttttaaattaaaaatgaagttttaaatcaatctaaagtatatatgagtaaacttggtctgacagttaccaatgcttaatcagtgaggcacctatctcagcgatctgtctatttcgttcatccatagttgcctgactccccgtcgtgtagataactacgatacgggagggcttaccatctggccccagtgctgcaatgataccgcgagacccacgctcaccggctccagatttatcagcaataaaccagccagccggaagggccgagcgcagaagtggtcctgcaactttatccgcctccatccagtctattaattgttgccgggaagctagagtaagtagttcgccagttaatagtttgcgcaacgttgttgccattgctacaggcatcgtggtgtcacgctcgtcgtttggtatggcttcattcagctccggttcccaacgatcaaggcgagttacatgatcccccatgttgtgcaaaaaagcggttagctccttcggtcctccgatcgttgtcagaagtaagttggccgcagtgttatcactcatggttatggcagcactgcataattctcttactgtcatgccatccgtaagatgcttttctgtgactggtgagtactcaaccaagtcattctgagaatagtgtatgcggcgaccgagttgctcttgcccggcgtcaatacgggataataccgcgccacatagcagaactttaaaagtgctcatcattggaaaacgttcttcggggcgaaaactctcaaggatcttaccgctgttgagatccagttcgatgtaacccactcgtgcacccaactgatcttcagcatcttttactttcaccagcgtttctgggtgagcaaaaacaggaaggcaaaatgccgcaaaaaagggaataagggcgacacggaaatgttgaatactcatactcttcctttttcaatattattgaagcatttatcagggttattgtctcatgagcggatacatatttgaatgtatttagaaaaataaacaaataggggttccgcgcacatttccccgaaaagtgccacctgagggcctatttcccatgattccttcatatttgcatatacgatacaaggctgttagagagataattagaattaatttgactgtaaacacaaagatattagtacaaaatacgtgacgtagaaagtaataatttcttgggtagtttgcagttttaaaattatgttttaaaatggactatcatatgcttaccgtaacttgaaagtatttcgatttcttggctttatatatcttgtggaaaggacgtccacggactgctgggttgtaccaaccctaactgtttgcagcaagcctggacatcgggaatgcgctactggaatcgagatatgctgtcaacctgcaacatgctattgattgtgagatcaatgttggatggacacggtagaccagaagtgttcagcaggagtgttccagccgtagcgtagaacgtagattggttagattaggttttccgagccggttgtcgcgcggttcaatccctggtgcgggtgctagtgccaatacccaccggctccgcactacagtcttctctgaagaccatttttt

SEQ ID NO: 563 - RNA, 276 nt, synthetic construct
  source 1..276: mol_type = other RNA
gtccacggactgctgggttgtaccaaccctaactgtttgcagcaagcctggacatcgggaatgcgctactggaatcgagatatgctgtcaacctgcaacatgctattgattgtgagatcaatgttggatggacacggtagaccagaagtgttcagcaggagtgttccagccgtagcgtagaacgtagattggttagattaggttttccgagccggttgtcgcgcggttcaatccctggtgcgggtgctagtgccaatacccaccggctccgcacta

SEQ ID NO: 564 - DNA, 3284 bp, synthetic construct
  source 1..3284: mol_type = other DNA; note = plasmid construct
aattctgtggaatgtgtgtcagttagggtgtggaaagtccccaggctccccagcaggcagaagtatgcaaagcatgcatctcaattagtcagcaaccaggtgtggaaagtccccaggctccccagcaggcagaagtatgcaaagcatgcatctcaattagtcagcaaccatagtcccgcccctaactccgcccatcccgcccctaactccgcccagttccgcccattctccgccccatggctgactaattttttttatttatgcagaggccgaggccgcctctgcctctgagctattccagaagtagtgaggaggcttttttggaggcctaggcttttgcaaaaagctaacttgtttattgcagcttataatggttacaaataaagcaatagcatcacaaatttcacaaataaagcatttttttcactgcattctagttgtggtttgtccaaactcatcaatgtatcttatcatgtctgtataccgtcgacctctagctagagcttggcgtaatcatggtcatagctgtttcctgtgtgaaattgttatccgctcacaattccacacaacatacgagccggaagcataaagtgtaaagcctggggtgcctaatgagtgagctaactcacattaattgcgttgcgctcactgcccgctttccagtcgggaaacctgtcgtgccagctgcattaatgaatcggccaacgcgcggggagaggcggtttgcgtattgggcgctcttccgcttcctcgctcactgactcgctgcgctcggtcgttcggctgcggcgagcggtatcagctcactcaaaggcggtaatacggttatccacagaatcaggggataacgcaggaaagaacatgtgagcaaaaggccagcaaaaggccaggaaccgtaaaaaggccgcgttgctggcgtttttccataggctccgcccccctgacgagcatcacaaaaatcgacgctcaagtcagaggtggcgaaacccgacaggactataaagataccaggcgtttccccctggaagctccctcgtgcgctctcctgttccgaccctgccgcttaccggatacctgtccgcctttctcccttcgggaagcgtggcgctttctcatagctcacgctgtaggtatctcagttcggtgtaggtcgttcgctccaagctgggctgtgtgcacgaaccccccgttcagcccgaccgctgcgccttatccggtaactatcgtcttgagtccaacccggtaagacacgacttatcgccactggcagcagccactggtaacaggattagcagagcgaggtatgtaggcggtgctacagagttcttgaagtggtggcctaactacggctacactagaagaacagtatttggtatctgcgctctgctgaagccagttaccttcggaaaaagagttggtagctcttgatccggcaaacaaaccaccgctggtagcggtttttttgtttgcaagcagcagattacgcgcagaaaaaaaggatctcaagaagatcctttgatcttttctacggggtctgacgctcagtggaacgaaaactcacgttaagggattttggtcatgagattatcaaaaaggatcttcacctagatccttttaaattaaaaatgaagttttaaatcaatctaaagtatatatgagtaaacttggtctgacagttaccaatgcttaatcagtgaggcacctatctcagcgatctgtctatttcgttcatccatagttgcctgactccccgtcgtgtagataactacgatacgggagggcttaccatctggccccagtgctgcaatgataccgcgagacccacgctcaccggctccagatttatcagcaataaaccagccagccggaagggccgagcgcagaagtggtcctgcaactttatccgcctccatccagtctattaattgttgccgggaagctagagtaagtagttcgccagttaatagtttgcgcaacgttgttgccattgctacaggcatcgtggtgtcacgctcgtcgtttggtatggcttcattcagctccggttcccaacgatcaaggcgagttacatgatcccccatgttgtgcaaaaaagcggttagctccttcggtcctccgatcgttgtcagaagtaagttggccgcagtgttatcactcatggttatggcagcactgcataattctcttactgtcatgccatccgtaagatgcttttctgtgactggtgagtactcaaccaagtcattctgagaatagtgtatgcggcgaccgagttgctcttgcccggcgtcaatacgggataataccgcgccacatagcagaactttaaaagtgctcatcattggaaaacgttcttcggggcgaaaactctcaaggatcttaccgctgttgagatccagttcgatgtaacccactcgtgcacccaactgatcttcagcatcttttactttcaccagcgtttctgggtgagcaaaaacaggaaggcaaaatgccgcaaaaaagggaataagggcgacacggaaatgttgaatactcatactcttcctttttcaatattattgaagcatttatcagggttattgtctcatgagcggatacatatttgaatgtatttagaaaaataaacaaataggggttccgcgcacatttccccgaaaagtgccacctgagggcctatttcccatgattccttcatatttgcatatacgatacaaggctgttagagagataattagaattaatttgactgtaaacacaaagatattagtacaaaatacgtgacgtagaaagtaataatttcttgggtagtttgcagttttaaaattatgttttaaaatggactatcatatgcttaccgtaacttgaaagtatttcgatttcttggctttatatatcttgtggaaaggacgagtttgtggagaaaaaattcaaaacacgacctcattcaagaccttggcgccgtcgtgaaggcaagattgaaaaagtccacggactgctgggttgtaccaaccctaactgtttgcagcaagcctggacatcgggaatgcgctactggaatcgagatatgctgtcaacctgcaacatgctattgattgtgagatcaatgttggatggacacggtagaccagaagtgttcagcaggagtgttccagccgtagcgtagaacgtagattggttagattaggttttccgagccggttgtcgcgcggttcaatccctggtgcgggtgctagtgccaatacccaccggctccgcactacagtcttctctgaagaccatttttt

SEQ ID NO: 565 - RNA, 351 nt, synthetic construct
  source 1..351: mol_type = other RNA
gagtttgtggagaaaaaattcaaaacacgacctcattcaagaccttggcgccgtcgtgaaggcaagattgaaaaagtccacggactgctgggttgtaccaaccctaactgtttgcagcaagcctggacatcgggaatgcgctactggaatcgagatatgctgtcaacctgcaacatgctattgattgtgagatcaatgttggatggacacggtagaccagaagtgttcagcaggagtgttccagccgtagcgtagaacgtagattggttagattaggttttccgagccggttgtcgcgcggttcaatccctggtgcgggtgctagtgccaatacccaccggctccgcacta

SEQ ID NO: 566 - DNA, 3359 bp, synthetic construct
  source 1..3359: mol_type = other DNA; note = plasmid construct
aattctgtggaatgtgtgtcagttagggtgtggaaagtccccaggctccccagcaggcagaagtatgcaaagcatgcatctcaattagtcagcaaccaggtgtggaaagtccccaggctccccagcaggcagaagtatgcaaagcatgcatctcaattagtcagcaaccatagtcccgcccctaactccgcccatcccgcccctaactccgcccagttccgcccattctccgccccatggctgactaattttttttatttatgcagaggccgaggccgcctctgcctctgagctattccagaagtagtgaggaggcttttttggaggcctaggcttttgcaaaaagctaacttgtttattgcagcttataatggttacaaataaagcaatagcatcacaaatttcacaaataaagcatttttttcactgcattctagttgtggtttgtccaaactcatcaatgtatcttatcatgtctgtataccgtcgacctctagctagagcttggcgtaatcatggtcatagctgtttcctgtgtgaaattgttatccgctcacaattccacacaacatacgagccggaagcataaagtgtaaagcctggggtgcctaatgagtgagctaactcacattaattgcgttgcgctcactgcccgctttccagtcgggaaacctgtcgtgccagctgcattaatgaatcggccaacgcgcggggagaggcggtttgcgtattgggcgctcttccgcttcctcgctcactgactcgctgcgctcggtcgttcggctgcggcgagcggtatcagctcactcaaaggcggtaatacggttatccacagaatcaggggataacgcaggaaagaacatgtgagcaaaaggccagcaaaaggccaggaaccgtaaaaaggccgcgttgctggcgtttttccataggctccgcccccctgacgagcatcacaaaaatcgacgctcaagtcagaggtggcgaaacccgacaggactataaagataccaggcgtttccccctggaagctccctcgtgcgctctcctgttccgaccctgccgcttaccggatacctgtccgcctttctcccttcgggaagcgtggcgctttctcatagctcacgctgtaggtatctcagttcggtgtaggtcgttcgctccaagctgggctgtgtgcacgaaccccccgttcagcccgaccgctgcgccttatccggtaactatcgtcttgagtccaacccggtaagacacgacttatcgccactggcagcagccactggtaacaggattagcagagcgaggtatgtaggcggtgctacagagttcttgaagtggtggcctaactacggctacactagaagaacagtatttggtatctgcgctctgctgaagccagttaccttcggaaaaagagttggtagctcttgatccggcaaacaaaccaccgctggtagcggtttttttgtttgcaagcagcagattacgcgcagaaaaaaaggatctcaagaagatcctttgatcttttctacggggtctgacgctcagtggaacgaaaactcacgttaagggattttggtcatgagattatcaaaaaggatcttcacctagatccttttaaattaaaaatgaagttttaaatcaatctaaagtatatatgagtaaacttggtctgacagttaccaatgcttaatcagtgaggcacctatctcagcgatctgtctatttcgttcatccatagttgcctgactccccgtcgtgtagataactacgatacgggagggcttaccatctggccccagtgctgcaatgataccgcgagacccacgctcaccggctccagatttatcagcaataaaccagccagccggaagggccgagcgcagaagtggtcctgcaactttatccgcctccatccagtctattaattgttgccgggaagctagagtaagtagttcgccagttaatagtttgcgcaacgttgttgccattgctacaggcatcgtggtgtcacgctcgtcgtttggtatggcttcattcagctccggttcccaacgatcaaggcgagttacatgatcccccatgttgtgcaaaaaagcggttagctccttcggtcctccgatcgttgtcagaagtaagttggccgcagtgttatcactcatggttatggcagcactgcataattctcttactgtcatgccatccgtaagatgcttttctgtgactggtgagtactcaaccaagtcattctgagaatagtgtatgcggcgaccgagttgctcttgcccggcgtcaatacgggataataccgcgccacatagcagaactttaaaagtgctcatcattggaaaacgttcttcggggcgaaaactctcaaggatcttaccgctgttgagatccagttcgatgtaacccactcgtgcacccaactgatcttcagcatcttttactttcaccagcgtttctgggtgagcaaaaacaggaaggcaaaatgccgcaaaaaagggaataagggcgacacggaaatgttgaatactcatactcttcctttttcaatattattgaagcatttatcagggttattgtctcatgagcggatacatatttgaatgtatttagaaaaataaacaaataggggttccgcgcacatttccccgaaaagtgccacctgagggcctatttcccatgattccttcatatttgcatatacgatacaaggctgttagagagataattagaattaatttgactgtaaacacaaagatattagtacaaaatacgtgacgtagaaagtaataatttcttgggtagtttgcagttttaaaattatgttttaaaatggactatcatatgcttaccgtaacttgaaagtatttcgatttcttggctttatatatcttgtggaaaggacaagcgcaaccgcattgattgtttccttctcgacgagtacaagacctcatctgtttgccctcgctgttcctcatctgagtttgtggagaaaaaattcaaaacacgacctcattcaagaccttggcgccgtcgtgaaggcaagattgaaaaagtccacggactgctgggttgtaccaaccctaactgtttgcagcaagcctggacatcgggaatgcgctactggaatcgagatatgctgtcaacctgcaacatgctattgattgtgagatcaatgttggatggacacggtagaccagaagtgttcagcaggagtgttccagccgtagcgtagaacgtagattggttagattaggttttccgagccggttgtcgcgcggttcaatccctggtgcgggtgctagtgccaatacccaccggctccgcactacagtcttctctgaagaccatttttt

SEQ ID NO: 567 - RNA, 426 nt, synthetic construct
  source 1..426: mol_type = other RNA
aagcgcaaccgcattgattgtttccttctcgacgagtacaagacctcatctgtttgccctcgctgttcctcatctgagtttgtggagaaaaaattcaaaacacgacctcattcaagaccttggcgccgtcgtgaaggcaagattgaaaaagtccacggactgctgggttgtaccaaccctaactgtttgcagcaagcctggacatcgggaatgcgctactggaatcgagatatgctgtcaacctgcaacatgctattgattgtgagatcaatgttggatggacacggtagaccagaagtgttcagcaggagtgttccagccgtagcgtagaacgtagattggttagattaggttttccgagccggttgtcgcgcggttcaatccctggtgcgggtgctagtgccaatacccaccggctccgcacta

SEQ ID NO: 568 - DNA, 3434 bp, synthetic construct
  source 1..3434: mol_type = other DNA; note = plasmid construct
aattctgtggaatgtgtgtcagttagggtgtggaaagtccccaggctccccagcaggcagaagtatgcaaagcatgcatctcaattagtcagcaaccaggtgtggaaagtccccaggctccccagcaggcagaagtatgcaaagcatgcatctcaattagtcagcaaccatagtcccgcccctaactccgcccatcccgcccctaactccgcccagttccgcccattctccgccccatggctgactaattttttttatttatgcagaggccgaggccgcctctgcctctgagctattccagaagtagtgaggaggcttttttggaggcctaggcttttgcaaaaagctaacttgtttattgcagcttataatggttacaaataaagcaatagcatcacaaatttcacaaataaagcatttttttcactgcattctagttgtggtttgtccaaactcatcaatgtatcttatcatgtctgtataccgtcgacctctagctagagcttggcgtaatcatggtcatagctgtttcctgtgtgaaattgttatccgctcacaattccacacaacatacgagccggaagcataaagtgtaaagcctggggtgcctaatgagtgagctaactcacattaattgcgttgcgctcactgcccgctttccagtcgggaaacctgtcgtgccagctgcattaatgaatcggccaacgcgcggggagaggcggtttgcgtattgggcgctcttccgcttcctcgctcactgactcgctgcgctcggtcgttcggctgcggcgagcggtatcagctcactcaaaggcggtaatacggttatccacagaatcaggggataacgcaggaaagaacatgtgagcaaaaggccagcaaaaggccaggaaccgtaaaaaggccgcgttgctggcgtttttccataggctccgcccccctgacgagcatcacaaaaatcgacgctcaagtcagaggtggcgaaacccgacaggactataaagataccaggcgtttccccctggaagctccctcgtgcgctctcctgttccgaccctgccgcttaccggatacctgtccgcctttctcccttcgggaagcgtggcgctttctcatagctcacgctgtaggtatctcagttcggtgtaggtcgttcgctccaagctgggctgtgtgcacgaaccccccgttcagcccgaccgctgcgccttatccggtaactatcgtcttgagtccaacccggtaagacacgacttatcgccactggcagcagccactggtaacaggattagcagagcgaggtatgtaggcggtgctacagagttcttgaagtggtggcctaactacggctacactagaagaacagtatttggtatctgcgctctgctgaagccagttaccttcggaaaaagagttggtagctcttgatccggcaaacaaaccaccgctggtagcggtttttttgtttgcaagcagcagattacgcgcagaaaaaaaggatctcaagaagatcctttgatcttttctacggggtctgacgctcagtggaacgaaaactcacgttaagggattttggtcatgagattatcaaaaaggatcttcacctagatccttttaaattaaaaatgaagttttaaatcaatctaaagtatatatgagtaaacttggtctgacagttaccaatgcttaatcagtgaggcacctatctcagcgatctgtctatttcgttcatccatagttgcctgactccccgtcgtgtagataactacgatacgggagggcttaccatctggccccagtgctgcaatgataccgcgagacccacgctcaccggctccagatttatcagcaataaaccagccagccggaagggccgagcgcagaagtggtcctgcaactttatccgcctccatccagtctattaattgttgccgggaagctagagtaagtagttcgccagttaatagtttgcgcaacgttgttgccattgctacaggcatcgtggtgtcacgctcgtcgtttggtatggcttcattcagctccggttcccaacgatcaaggcgagttacatgatcccccatgttgtgcaaaaaagcggttagctccttcggtcctccgatcgttgtcagaagtaagttggccgcagtgttatcactcatggttatggcagcactgcataattctcttactgtcatgccatccgtaagatgcttttctgtgactggtgagtactcaaccaagtcattctgagaatagtgtatgcggcgaccgagttgctcttgcccggcgtcaatacgggataataccgcgccacatagcagaactttaaaagtgctcatcattggaaaacgttcttcggggcgaaaactctcaaggatcttaccgctgttgagatccagttcgatgtaacccactcgtgcacccaactgatcttcagcatcttttactttcaccagcgtttctgggtgagcaaaaacaggaaggcaaaatgccgcaaaaaagggaataagggcgacacggaaatgttgaatactcatactcttcctttttcaatattattgaagcatttatcagggttattgtctcatgagcggatacatatttgaatgtatttagaaaaataaacaaataggggttccgcgcacatttccccgaaaagtgccacctgagggcctatttcccatgattccttcatatttgcatatacgatacaaggctgttagagagataattagaattaatttgactgtaaacacaaagatattagtacaaaatacgtgacgtagaaagtaataatttcttgggtagtttgcagttttaaaattatgttttaaaatggactatcatatgcttaccgtaacttgaaagtatttcgatttcttggctttatatatcttgtggaaaggacggtgattggagcgacgctggtcgaactgcgagatttcagacctcatcaaagacaaaaggctggcgcaccctctttaagcgcaaccgcattgattgtttccttctcgacgagtacaagacctcatctgtttgccctcgctgttcctcatctgagtttgtggagaaaaaattcaaaacacgacctcattcaagaccttggcgccgtcgtgaaggcaagattgaaaaagtccacggactgctgggttgtaccaaccctaactgtttgcagcaagcctggacatcgggaatgcgctactggaatcgagatatgctgtcaacctgcaacatgctattgattgtgagatcaatgttggatggacacggtagaccagaagtgttcagcaggagtgttccagccgtagcgtagaacgtagattggttagattaggttttccgagccggttgtcgcgcggttcaatccctggtgcgggtgctagtgccaatacccaccggctccgcactacagtcttctctgaagaccatttttt

SEQ ID NO: 569 - RNA, 501 nt, synthetic construct
  source 1..501: mol_type = other RNA
ggtgattggagcgacgctggtcgaactgcgagatttcagacctcatcaaagacaaaaggctggcgcaccctctttaagcgcaaccgcattgattgtttccttctcgacgagtacaagacctcatctgtttgccctcgctgttcctcatctgagtttgtggagaaaaaattcaaaacacgacctcattcaagaccttggcgccgtcgtgaaggcaagattgaaaaagtccacggactgctgggttgtaccaaccctaactgtttgcagcaagcctggacatcgggaatgcgctactggaatcgagatatgctgtcaacctgcaacatgctattgattgtgagatcaatgttggatggacacggtagaccagaagtgttcagcaggagtgttccagccgtagcgtagaacgtagattggttagattaggttttccgagccggttgtcgcgcggttcaatccctggtgcgggtgctagtgccaatacccaccggctccgcacta

SEQ ID NO: 570 - DNA, 5723 bp, synthetic construct
  source 1..5723: mol_type = other DNA; note = Fanzor plasmid pMJ145_pCMV-HA-NLS-Hs_FZID16
cgttacataacttacggtaaatggcccgcctggctgaccgcccaacgacccccgcccattgacgtcaataatgacgtatgttcccatagtaacgccaatagggactttccattgacgtcaatgggtggagtatttacggtaaactgcccacttggcagtacatcaagtgtatcatatgccaagtacgccccctattgacgtcaatgacggtaaatggcccgcctggcattatgcccagtacatgaccttatgggactttcctacttggcagtacatctacgtattagtcatcgctattaccatggtgatgcggttttggcagtacatcaatgggcgtggatagcggtttgactcacggggatttccaagtctccaccccattgacgtcaatgggagtttgttttggcaccaaaatcaacgggactttccaaaatgtcgtaacaactccgccccattgacgcaaatgggcggtaggcgtgtacggtgggaggtctatataagcagagctggtttagtgaaccgtcagatccgctagcgctaccggactcagatcgccaccatgtacccctacgacgtgccagactacgcccctaagaagaagagaaaagtcggcggctctggcggcggaggatctggcggaggtggaagcggaggaccgcctaagaagaagcagaagctggaacggctgaagaaactggacaagcccacactgcacacctgtaacaagaccagcttcgccaaggccttcctgcctaacgagacataccggcagcggctgctggactatatcgccatcattcaccagctggccgaccacgcctctcacgccctgaagttttacatcctgagcacctccaccagcagcttccctgtggtgcacgaggataccatcgaggccatcctgtacctgctgaacaagggcgaagcctggcatcccagaaaagaggccaagaaggcctggcgggattgcctgctgccttacgtgcagagatactgccagatcgtgggcttcattcaccccaacctgagaggcgagcagcagagcatcaactacctgaccgtgtccatgatgaccaacctgaaagtgaacgtgcaagagcacttcatgcagatgctgctgcggtacatcaatctgcgcttcgacgtgaagggccagaagcagagactgcctcctaagagcgacgcccgcaaggcctttttcacccggctgagatacctgaagtccgtgttcctgttcgacgtggtgcccgagctggaattcctggacgatctgacccctctggaaagcgaggtgctggaagagatctggtccctggacctgccttttctgcccaacgatcctctggcctacgccatcgtggccgatcctatgagcttcttcccagcctactgcaagctgagcggcctgtacgagcagtacggcttccagcggtttagcgccattcctctgcggagaagcctgatccagtctcacgtgcggatcgacaccatcatcctgtatcagcacatcctgtgcatcaccagacgggacgccgagacagtggaaaaggacgacctgtggatgagagtgtgcaacctgtgcaccaaagccttccggtccagatgcggcatgcacttcgagggcagcatcacaacagatggcgccagcgtgtccgtgtacctgaaacaccctgaggccgataagtacggcaagagaggcgccagaaagtccgccaatactgtggccgccgaagtgaaggccctgtacgtggaaaacaacctgcctgcctgtagagccgccgagaacgtggtggtcatcgaccccaacaagcgggatatcctgtactgccaggacagcaacggcaccaccttcagatacaccgccaaccagagagccgtggaaaccggcagcagaagattcgccaagcggcgggaagccatgaaggaagaagccggcgttgacctgatcgagagcagaatccctagccacaagaccatgaacctgatggacttcaccagatacctgctcgtgcggagagccgactgggacagacggaaagagttctactctcaccccgctcacacccggtggaagtggcacagcttcatcaaccggcagaagtccgagagcgacctgatcagcaacatgcggaacaaatacggcgagaacttcaccgtggtcatgggcgattggagcgacgctggaagaaccgccagattccagaccagcagcaagaccaaaggctggcggaccctgttcaagcggaaccggatcgattgcttcctgctggacgagtacaagacctccagcgtgtgccctagatgcagcagcagcgagttcgtggaaaagaagttcaagacccggcctcacagcagaccctggcgaagaagagagggcaagatcgagaaggtgcacggcctgctgggctgcaccaatcctaattgtctgcagcaggcctggaccagcggcatgagatactggaaccgggacatgctgagcacatgcaacatgctgctgatcgtgcggtccatgctggatggccatggcagacctgaggtgttctctagatctgtgcctgccgtggcctgactagcataaccccttggggcgcactcctcaggtgcaggctgcctatcagaaggtggtggctggtgtggccaatgccctggctcacaaataccactgagatctttttccctctgccaaaaattatggggacatcatgaagccccttgagcatctgacttctggctaataaaggaaatttattttcattgcaatagtgtgttggaattttttgtgtctctcactcggaaggacatatgggagggcaaatcatttaaaacatcagaatgagtatttggtttagagtttggcaacatatgcccatatgctggctgccatgaacaaaggttggctataaagaggtcatcagtatatgaaacagccccctgctgtccattccttattccatagaaaagccttgacttgaggttagattttttttatattttgttttgtgttatttttttctttaacatccctaaaattttccttacatgttttactagccagatttttcctcctctcctgactactcccagtcatagctgtccctcttctcttatggagatccctcgacctgcagcccaagcttggcgtaatcatggtcatagctgtttcctgtgtgaaattgttatccgctcacaattccacacaacatacgagccggaagcataaagtgtaaagcctggggtgcctaatgagtgagctaactcacattaattgcgttgcgctcactgcccgctttccagtcgggaaacctgtcgtgccagcggatccgcatctcaattagtcagcaaccatagtcccgcccctaactccgcccatcccgcccctaactccgcccagttccgcccattctccgccccatggctgactaattttttttatttatgcagaggccgaggccgcctcggcctctgagctattccagaagtagtgaggaggcttttttggaggcctaggcttttgcaaaaagctaacttgtttattgcagcttataatggttacaaataaagcaatagcatcacaaatttcacaaataaagcatttttttcactgcattctagttgtggtttgtccaaactcatcaatgtatcttatcatgtctggatccgctgcattaatgaatcggccaacgcgcggggagaggcggtttgcgtattgggcgctcttccgcttcctcgctcactgactcgctgcgctcggtcgttcggctgcggcgagcggtatcagctcactcaaaggcggtaatacggttatccacagaatcaggggataacgcaggaaagaacatgtgagcaaaaggccagcaaaaggccaggaaccgtaaaaaggccgcgttgctggcgtttttccataggctccgcccccctgacgagcatcacaaaaatcgacgctcaagtcagaggtggcgaaacccgacaggactataaagataccaggcgtttccccctggaagctccctcgtgcgctctcctgttccgaccctgccgcttaccggatacctgtccgcctttctcccttcgggaagcgtggcgctttctcatagctcacgctgtaggtatctcagttcggtgtaggtcgttcgctccaagctgggctgtgtgcacgaaccccccgttcagcccgaccgctgcgccttatccggtaactatcgtcttgagtccaacccggtaagacacgacttatcgccactggcagcagccactggtaacaggattagcagagcgaggtatgtaggcggtgctacagagttcttgaagtggtggcctaactacggctacactagaagaacagtatttggtatctgcgctctgctgaagccagttaccttcggaaaaagagttggtagctcttgatccggcaaacaaaccaccgctggtagcggtggtttttttgtttgcaagcagcagattacgcgcagaaaaaaaggatctcaagaagatcctttgatcttttctacggggtctgacgctcagtggaacgaaaactcacgttaagggattttggtcatgagattatcaaaaaggatcttcacctagatccttttaaattaaaaatgaagttttaaatcaatctaaagtatatatgagtaaacttggtctgacagttaccaatgcttaatcagtgaggcacctatctcagcgatctgtctatttcgttcatccatagttgcctgactccccgtcgtgtagataactacgatacgggagggcttaccatctggccccagtgctgcaatgataccgcgagacccacgctcaccggctccagatttatcagcaataaaccagccagccggaagggccgagcgcagaagtggtcctgcaactttatccgcctccatccagtctattaattgttgccgggaagctagagtaagtagttcgccagttaatagtttgcgcaacgttgttgccattgctacaggcatcgtggtgtcacgctcgtcgtttggtatggcttcattcagctccggttcccaacgatcaaggcgagttacatgatcccccatgttgtgcaaaaaagcggttagctccttcggtcctccgatcgttgtcagaagtaagttggccgcagtgttatcactcatggttatggcagcactgcataattctcttactgtcatgccatccgtaagatgcttttctgtgactggtgagtactcaaccaagtcattctgagaatagtgtatgcggcgaccgagttgctcttgcccggcgtcaatacgggataataccgcgccacatagcagaactttaaaagtgctcatcattggaaaacgttcttcggggcgaaaactctcaaggatcttaccgctgttgagatccagttcgatgtaacccactcgtgcacccaactgatcttcagcatcttttactttcaccagcgtttctgggtgagcaaaaacaggaaggcaaaatgccgcaaaaaagggaataagggcgacacggaaatgttgaatactcatactcttcctttttcaatattattgaagcatttatcagggttattgtctcatgagcggatacatatttgaatgtatttagaaaaataaacaaataggggttccgcgcacatttccccgaaaagtgccacctgggtcgacattgattattgactagtaatagtaatcaattacggggtcattagttcatagcccatatatggagttccg

SEQ ID NO: 571 - DNA, 5723 bp, synthetic construct
  source 1..5723: mol_type = other DNA; note = Fanzor plasmid pMJ149_pCMV-Hs_FZID16-NLS-HA
cgttacataacttacggtaaatggcccgcctggctgaccgcccaacgacccccgcccattgacgtcaataatgacgtatgttcccatagtaacgccaatagggactttccattgacgtcaatgggtggagtatttacggtaaactgcccacttggcagtacatcaagtgtatcatatgccaagtacgccccctattgacgtcaatgacggtaaatggcccgcctggcattatgcccagtacatgaccttatgggactttcctacttggcagtacatctacgtattagtcatcgctattaccatggtgatgcggttttggcagtacatcaatgggcgtggatagcggtttgactcacggggatttccaagtctccaccccattgacgtcaatgggagtttgttttggcaccaaaatcaacgggactttccaaaatgtcgtaacaactccgccccattgacgcaaatgggcggtaggcgtgtacggtgggaggtctatataagcagagctggtttagtgaaccgtcagatccgctagcgctaccggactcagatcgccaccatgccgcctaagaagaagcagaagctggaacggctgaagaaactggacaagcccacactgcacacctgtaacaagaccagcttcgccaaggccttcctgcctaacgagacataccggcagcggctgctggactatatcgccatcattcaccagctggccgaccacgcctctcacgccctgaagttttacatcctgagcacctccaccagcagcttccctgtggtgcacgaggataccatcgaggccatcctgtacctgctgaacaagggcgaagcctggcatcccagaaaagaggccaagaaggcctggcgggattgcctgctgccttacgtgcagagatactgccagatcgtgggcttcattcaccccaacctgagaggcgagcagcagagcatcaactacctgaccgtgtccatgatgaccaacctgaaagtgaacgtgcaagagcacttcatgcagatgctgctgcggtacatcaatctgcgcttcgacgtgaagggccagaagcagagactgcctcctaagagcgacgcccgcaaggcctttttcacccggctgagatacctgaagtccgtgttcctgttcgacgtggtgcccgagctggaattcctggacgatctgacccctctggaaagcgaggtgctggaagagatctggtccctggacctgccttttctgcccaacgatcctctggcctacgccatcgtggccgatcctatgagcttcttcccagcctactgcaagctgagcggcctgtacgagcagtacggcttccagcggtttagcgccattcctctgcggagaagcctgatccagtctcacgtgcggatcgacaccatcatcctgtatcagcacatcctgtgcatcaccagacgggacgccgagacagtggaaaaggacgacctgtggatgagagtgtgcaacctgtgcaccaaagccttccggtccagatgcggcatgcacttcgagggcagcatcacaacagatggcgccagcgtgtccgtgtacctgaaacaccctgaggccgataagtacggcaagagaggcgccagaaagtccgccaatactgtggccgccgaagtgaaggccctgtacgtggaaaacaacctgcctgcctgtagagccgccgagaacgtggtggtcatcgaccccaacaagcgggatatcctgtactgccaggacagcaacggcaccaccttcagatacaccgccaaccagagagccgtggaaaccggcagcagaagattcgccaagcggcgggaagccatgaaggaagaagccggcgttgacctgatcgagagcagaatccctagccacaagaccatgaacctgatggacttcaccagatacctgctcgtgcggagagccgactgggacagacggaaagagttctactctcaccccgctcacacccggtggaagtggcacagcttcatcaaccggcagaagtccgagagcgacctgatcagcaacatgcggaacaaatacggcgagaacttcaccgtggtcatgggcgattggagcgacgctggaagaaccgccagattccagaccagcagcaagaccaaaggctggcggaccctgttcaagcggaaccggatcgattgcttcctgctggacgagtacaagacctccagcgtgtgccctagatgcagcagcagcgagttcgtggaaaagaagttcaagacccggcctcacagcagaccctggcgaagaagagagggcaagatcgagaaggtgcacggcctgctgggctgcaccaatcctaattgtctgcagcaggcctggaccagcggcatgagatactggaaccgggacatgctgagcacatgcaacatgctgctgatcgtgcggtccatgctggatggccatggcagacctgaggtgttctctagatctgtgcctgccgtggccggaggatctggcggaggcggctctggcggcggtggaagcggaggacctaagaagaagagaaaagtctacccctacgacgtgccagactacgcctgactagcataaccccttggggcgcactcctcaggtgcaggctgcctatcagaaggtggtggctggtgtggccaatgccctggctcacaaataccactgagatctttttccctctgccaaaaattatggggacatcatgaagccccttgagcatctgacttctggctaataaaggaaatttattttcattgcaatagtgtgttggaattttttgtgtctctcactcggaaggacatatgggagggcaaatcatttaaaacatcagaatgagtatttggtttagagtttggcaacatatgcccatatgctggctgccatgaacaaaggttggctataaagaggtcatcagtatatgaaacagccccctgctgtccattccttattccatagaaaagccttgacttgaggttagattttttttatattttgttttgtgttatttttttctttaacatccctaaaattttccttacatgttttactagccagatttttcctcctctcctgactactcccagtcatagctgtccctcttctcttatggagatccctcgacctgcagcccaagcttggcgtaatcatggtcatagctgtttcctgtgtgaaattgttatccgctcacaattccacacaacatacgagccggaagcataaagtgtaaagcctggggtgcctaatgagtgagctaactcacattaattgcgttgcgctcactgcccgctttccagtcgggaaacctgtcgtgccagcggatccgcatctcaattagtcagcaaccatagtcccgcccctaactccgcccatcccgcccctaactccgcccagttccgcccattctccgccccatggctgactaattttttttatttatgcagaggccgaggccgcctcggcctctgagctattccagaagtagtgaggaggcttttttggaggcctaggcttttgcaaaaagctaacttgtttattgcagcttataatggttacaaataaagcaatagcatcacaaatttcacaaataaagcatttttttcactgcattctagttgtggtttgtccaaactcatcaatgtatcttatcatgtctggatccgctgcattaatgaatcggccaacgcgcggggagaggcggtttgcgtattgggcgctcttccgcttcctcgctcactgactcgctgcgctcggtcgttcggctgcggcgagcggtatcagctcactcaaaggcggtaatacggttatccacagaatcaggggataacgcaggaaagaacatgtgagcaaaaggccagcaaaaggccaggaaccgtaaaaaggccgcgttgctggcgtttttccataggctccgcccccctgacgagcatcacaaaaatcgacgctcaagtcagaggtggcgaaacccgacaggactataaagataccaggcgtttccccctggaagctccctcgtgcgctctcctgttccgaccctgccgcttaccggatacctgtccgcctttctcccttcgggaagcgtggcgctttctcatagctcacgctgtaggtatctcagttcggtgtaggtcgttcgctccaagctgggctgtgtgcacgaaccccccgttcagcccgaccgctgcgccttatccggtaactatcgtcttgagtccaacccggtaagacacgacttatcgccactggcagcagccactggtaacaggattagcagagcgaggtatgtaggcggtgctacagagttcttgaagtggtggcctaactacggctacactagaagaacagtatttggtatctgcgctctgctgaagccagttaccttcggaaaaagagttggtagctcttgatccggcaaacaaaccaccgctggtagcggtggtttttttgtttgcaagcagcagattacgcgcagaaaaaaaggatctcaagaagatcctttgatcttttctacggggtctgacgctcagtggaacgaaaactcacgttaagggattttggtcatgagattatcaaaaaggatcttcacctagatccttttaaattaaaaatgaagttttaaatcaatctaaagtatatatgagtaaacttggtctgacagttaccaatgcttaatcagtgaggcacctatctcagcgatctgtctatttcgttcatccatagttgcctgactccccgtcgtgtagataactacgatacgggagggcttaccatctggccccagtgctgcaatgataccgcgagacccacgctcaccggctccagatttatcagcaataaaccagccagccggaagggccgagcgcagaagtggtcctgcaactttatccgcctccatccagtctattaattgttgccgggaagctagagtaagtagttcgccagttaatagtttgcgcaacgttgttgccattgctacaggcatcgtggtgtcacgctcgtcgtttggtatggcttcattcagctccggttcccaacgatcaaggcgagttacatgatcccccatgttgtgcaaaaaagcggttagctccttcggtcctccgatcgttgtcagaagtaagttggccgcagtgttatcactcatggttatggcagcactgcataattctcttactgtcatgccatccgtaagatgcttttctgtgactggtgagtactcaaccaagtcattctgagaatagtgtatgcggcgaccgagttgctcttgcccggcgtcaatacgggataataccgcgccacatagcagaactttaaaagtgctcatcattggaaaacgttcttcggggcgaaaactctcaaggatcttaccgctgttgagatccagttcgatgtaacccactcgtgcacccaactgatcttcagcatcttttactttcaccagcgtttctgggtgagcaaaaacaggaaggcaaaatgccgcaaaaaagggaataagggcgacacggaaatgttgaatactcatactcttcctttttcaatattattgaagcatttatcagggttattgtctcatgagcggatacatatttgaatgtatttagaaaaataaacaaataggggttccgcgcacatttccccgaaaagtgccacctgggtcgacattgattattgactagtaatagtaatcaattacggggtcattagttcatagcccatatatggagttccg

SEQ ID NO: 572 - DNA, 3008 bp, synthetic construct; identical to SEQ ID NO: 554
  source 1..3008: mol_type = other DNA; note = Fanzor plasmid pMJ162_pU6-ID16-empty

SEQ ID NO: 573 - DNA, 3076 bp, synthetic construct; identical to SEQ ID NO: 556
  source 1..3076: mol_type = other DNA; note = Fanzor plasmid pMJ168_pU6-HDV-ID16-empty

SEQ ID NO: 574 - DNA, 3095 bp, synthetic construct; identical to SEQ ID NO: 558
  source 1..3095: mol_type = other DNA; note = Fanzor plasmid pMJ169_pU6-ID16_RNA1-empty

SEQ ID NO: 575 - DNA, 3134 bp, synthetic construct; identical to SEQ ID NO: 560
  source 1..3134: mol_type = other DNA; note = Fanzor plasmid pMJ170_pU6-ID16_RNA2-empty

SEQ ID NO: 576 - DNA, 3209 bp, synthetic construct; identical to SEQ ID NO: 562
  source 1..3209: mol_type = other DNA; note = Fanzor plasmid pMJ171_pU6-ID16_RNA3-empty

SEQ ID NO: 577 - DNA, 3284 bp, synthetic construct; identical to SEQ ID NO: 564
  source 1..3284: mol_type = other DNA; note = Fanzor plasmid pMJ204_pU6-ID16_RNA4-empty

SEQ ID NO: 578 - DNA, 3359 bp, synthetic construct; identical to SEQ ID NO: 566
  source 1..3359: mol_type = other DNA; note = Fanzor plasmid pMJ205_pU6-ID16_RNA5-empty

SEQ ID NO: 579 - DNA, 3434 bp, synthetic construct; identical to SEQ ID NO: 568
  source 1..3434: mol_type = other DNA; note = Fanzor plasmid pMJ206_pU6-ID16_RNA6-empty

SEQ ID NO: 580 - DNA, 1917 bp, synthetic construct
  source 1..1917: mol_type = other DNA; note = Fanzor Ortholog
atgccgcctaagaagaagcagaagctggaacggctgaagaaactggacaagcccacactgcacacctgtaacaagaccagcttcgccaaggccttcctgcctaacgagacataccggcagcggctgctggactatatcgccatcattcaccagctggccgaccacgcctctcacgccctgaagttttacatcctgagcacctccaccagcagcttccctgtggtgcacgaggataccatcgaggccatcctgtacctgctgaacaagggcgaagcctggcatcccagaaaagaggccaagaaggcctggcgggattgcctgctgccttacgtgcagagatactgccagatcgtgggcttcattcaccccaacctgagaggcgagcagcagagcatcaactacctgaccgtgtccatgatgaccaacctgaaagtgaacgtgcaagagcacttcatgcagatgctgctgcggtacatcaatctgcgcttcgacgtgaagggccagaagcagagactgcctcctaagagcgacgcccgcaaggcctttttcacccggctgagatacctgaagtccgtgttcctgttcgacgtggtgcccgagctggaattcctggacgatctgacccctctggaaagcgaggtgctggaagagatctggtccctggacctgccttttctgcccaacgatcctctggcctacgccatcgtggccgatcctatgagcttcttcccagcctactgcaagctgagcggcctgtacgagcagtacggcttccagcggtttagcgccattcctctgcggagaagcctgatccagtctcacgtgcggatcgacaccatcatcctgtatcagcacatcctgtgcatcaccagacgggacgccgagacagtggaaaaggacgacctgtggatgagagtgtgcaacctgtgcaccaaagccttccggtccagatgcggcatgcacttcgagggcagcatcacaacagatggcgccagcgtgtccgtgtacctgaaacaccctgaggccgataagtacggcaagagaggcgccagaaagtccgccaatactgtggccgccgaagtgaaggccctgtacgtggaaaacaacctgcctgcctgtagagccgccgagaacgtggtggtcatcgaccccaacaagcgggatatcctgtactgccaggacagcaacggcaccaccttcagatacaccgccaaccagagagccgtggaaaccggcagcagaagattcgccaagcggcgggaagccatgaaggaagaagccggcgttgacctgatcgagagcagaatccctagccacaagaccatgaacctgatggacttcaccagatacctgctcgtgcggagagccgactgggacagacggaaagagttctactctcaccccgctcacacccggtggaagtggcacagcttcatcaaccggcagaagtccgagagcgacctgatcagcaacatgcggaacaaatacggcgagaacttcaccgtggtcatgggcgattggagcgacgctggaagaaccgccagattccagaccagcagcaagaccaaaggctggcggaccctgttcaagcggaaccggatcgattgcttcctgctggacgagtacaagacctccagcgtgtgccctagatgcagcagcagcgagttcgtggaaaagaagttcaagacccggcctcacagcagaccctggcgaagaagagagggcaagatcgagaaggtgcacggcctgctgggctgcaccaatcctaattgtctgcagcaggcctggaccagcggcatgagatactggaaccgggacatgctgagcacatgcaacatgctgctgatcgtgcggtccatgctggatggccatggcagacctgaggtgttctctagatctgtgcctgccgtggcctga

SEQ ID NO: 581 - DNA, 1917 bp, synthetic construct
  source 1..1917: mol_type = other DNA; note = Fanzor Ortholog
atgccgccaaagaagaagcaaaagcttgaaaggctcaaaaaactcgacaaacccaccttacatacctgcaacaagacgtcctttgcaaaggctttcttgcctaatgagacctaccggcagcgtcttctagattacatcgccatcatccatcaactcgctgaccatgcttcccacgctctcaaattctacatcctctctacatccacatcgtctttcccggttgttcacgaagatacaatcgaagccattctctatcttctcaacaagggggaggcttggcatccaagaaaggaagcaaagaaggcatggcgggattgtttgttgccatatgttcaacggtactgccaaatcgtcggcttcattcatccaaatctacgaggcgagcagcagtcaattaattacctgacagtgagtatgatgacgaacctgaaagtcaacgttcaagagcatttcatgcagatgctgctccggtacattaatctgcggttcgacgtgaagggacagaagcagcgactgccaccgaaaagcgatgcgcgaaaggctttctttactcggctacgctacttgaagtcggttttcctttttgatgtggtgcccgagttggagttcctggatgacttgacaccattggagagcgaggttcttgaagagatttggtcattggatctcccattccttcctaacgatccccttgcctacgccattgttgctgatccgatgtcattttttcccgcgtactgcaaactctctgggctgtatgaacaatatggcttccaacggttcagtgcgatacctctgcgccgctcgctcattcaaagtcacgtgcgaatcgacaccatcatcctgtaccagcatatcctttgcatcacgcggcgagacgcagaaactgtcgaaaaggatgatctgtggatgcgcgtctgcaatctatgtaccaaggcttttcggtctcgctgtggtatgcattttgaaggctcaatcaccacggatggagcctcggtgtctgtatacctaaagcacccagaagcagacaagtatggaaagcgcggagcgagaaagtcagcaaacacggtggctgcagaggttaaagcgctttatgtggagaacaacttacctgcttgtcgagcagcagagaatgtcgtcgttatcgacccaaacaagcgcgacattctctactgccaagacagcaatggtacgacatttcgctacaccgccaaccagcgagccgtggagactggaagccggcggtttgcaaagagacgagaagcaatgaaggaagaagctggagttgatctcatagaatcacgaataccatcccacaaaacaatgaacctcatggacttcactcgctaccttctcgttcgccgcgctgattgggatcgtcgcaaggaattctattcgcatcctgctcatactcgatggaaatggcactccttcataaaccgtcagaagagcgaatcagacctcataagtaacatgcgcaacaagtacggtgaaaactttactgttgtgatgggtgattggagcgacgctggtcgaactgcgagatttcagacctcatcaaagacaaaaggctggcgcaccctctttaagcgcaaccgcattgattgtttccttctcgacgagtacaagacctcatctgtttgccctcgctgttcctcatctgagtttgtggagaaaaaattcaaaacacgacctcattcaagaccttggcgccgtcgtgaaggcaagattgaaaaagtccacggactgctgggttgtaccaaccctaactgtttgcagcaagcctggacatcgggaatgcgctactggaatcgagatatgctgtcaacctgcaacatgctattgattgtgagatcaatgttggatggacacggtagaccagaagtgttcagcaggagtgttccagccgtagcgtag

SEQ ID NO: 582 - protein, 452 aa, Mercenaria sp.
MNRKRSLSPLTLWKAAHVFKHQNLECWFQFAKDGESHNKVFASDFERTRKRAKLEDEKTFMTTFSVGIRPTRNQKRVLNEMLRVSNHAYNWCNYLVCEKNLKPKEYDLQKYVSKTNSSDVPTDFRMNNNDDWYFNNKMTKIRDAACKDFCTMYKSALTNQRKKKKYIKTVSLKDKDDMNPSHGAFEIQKALIRKLKETDSDDYDILNNCLSVMADNFTMRRKDVRNRFLRLSKPVSKLPPLEHAVKIVKTAKGKFVLHIPCEPTYTRSKRYDEPFDSLCGIDPGGRTFLTIYDPSKPRAFQIASRCKAPSKPVRKRTKKKGEKWHRKKKSQRRVGSTIDKIDSLHAKKDYVNSKMQAAIRRKQPQAKKDRQRQLQKVYYQLGNVIRWVHLRCTYNLMQYSYVAIGKIGIPSIIRRQCNGKRRRINKKSVRHLTVWNHCKFRERLVYRAKGTK

SEQ ID NO: 583 - protein, 478 aa, Mercenaria sp.
MKRKREQMTLWKAAFVNGRETFKSWIDKARMLELNCDISSASSTHYSDLDLKSKCAKIEDKFMCTFSVGIRPTSKQNRTLNQMLKVSNYAYNWCNHLVKEKDFKPKQFDLQRVVTKTNSHDVPAEYRLPGDDWFFDNKMSSIKLTACKNFCTMYKSARTNQKKTKVDLRNKDTALLREGSFEVQRQYVRLLTEKDIPDERIRQSRIALMADNFSKSKKDWKERFLRLSKNVSKIPPLNHDMKVCKRPNGKFILQIPCDPICTRQIQVHTSDSICSIDPGGRTFATCYDPSNIKTFQIGPEADKKEIIHKFHNKIDNVHRLLSYAQKKKQTQAVQDRIGQLKKLHLKLKTYVDDVHLKLCSYLVKNYKLVVLGRISVSSIVRKDRPNHLAKKGNRDLLCWQHFRFRQRLLHRVRGTDCEAIAQDERYTSKTCGNCGVQNNKLGGNETFHCKSCNYKTHRDVNGARNILCKYLGHFPFAT

SEQ ID NO: 584 - protein, 498 aa, Mercenaria sp.
MLFFLVPIKPVALRFSPHFRMKRKREQMTLWKAAFVNGQETFKSWIDKVRMLELNCDISSASSTHYSDLNLKTKCAKTEDKFMCTYSVGIRPTSKQKRTLNQMLKVSNYAYNWCNYLVKEKDFKPKQFDLQRVVAKTNSTDVPAEYRLPGDDWSFDNKMSGIKLTACKNFCTMYKSAQTNQKKTKVDLRNKDIVQLREGSFEVQSKYVRLLTEKDIPGERIRQSRIALTPDSFSKSKKDWKERFLRLSKNVSKIPPLSHDMKVCKRPNGKFILQISCDPICTRQIQVQTSDSICSIDPGGRTFATCYDPSNIKTFQIGPEADKKEIIHEFHNKIDYVHRLLSHAQEKKQTQAVQDRIGQLKKLHLKLKTYVDDVHLKLCSYLVKNYKLVVLGKISVSSIVRKDRQNHLPKSANRDLLCWQHYRFRQRLLHRVRGTDCEAVAQDERYTSKTCGNCGVKNNKLGGKETFHCKSCNYITHRDVNGARNILCKYLGLFPFAA

SEQ ID NO: 585 - protein, 478 aa, Mercenaria sp.
MKRKREQMTLWKAAFVNGQETFKSWIDKARMLELNCDVSSASSTHYSDLNLKTKCAKTDDKFMCNYSVCIRPTSKQKRTLNQMLKVSNYAYNWCNYLVKEKDFKPKQFDLQRIVAKTNSTDVPAEYRLPGDDWFFDNKMSSIKLTACKNFCTMYKSTQTNQKKTKVDLRNKDIVQLREGSFEVQSKYVRLLTEKDIPGERIRQSRIALMPDSFSKSKKDWKERFLRLSKNVSKIPPLSHDMKVCKRPNGKFILQISCDPICTRQIQVQTSDSICSIDPGGRTFATCYDPSNIKTFQIGPEADKKEIIHEFHNKIDYVHRLLSHAQEKKQTQAVQDRIGQLKKLHLKLKTYVDDVHLKLCSYLVKNYKLVVLGKISVSSIVRKDRPNHLAKSANRDLLCWQHYRFRQRLLHRVRGTDCEVIIQDERYTSKTCGNCGEKNNKLGGKETFTCESCNYKTHRDVNGARNILCKYLGLFPFAA

SEQ ID NO: 586 - protein, 463 aa, Mercenaria sp.
MKRKREQMTLWKAAFVNGRETFKSWIDKVRMLELNCDISSASSTHYSDLNLKTKCAKTEDKFMCTYSVGIRPTSKQKRTLNQMLKVSNYAYNWCNYLVKEKDFKPKQFDLQRVVAKTNSTDVPAEYRLPGDDWSFDNKMSGIKLTACKNFCTMYKSAQTNQKKTKVDLRNKDIVQLREGSFEVQSKYVSLLTEKDIPGERIRQLRIALMPDSFSKSKKDWKERFLRLSKNVSKIPPLSHDMKVCKRPDGKFILQIPCDPICTRQIQVQTSDSICSIDPGGRTFATCYDPSNIKAFQIGPEADKKEIIHEFHNKIDYVHRLLSHAQEKKQTQAVQDRIGQLKKLHLKLKTYVDDVHLKLCSYLVKNYKLVVLGKISVSSIVRKDRPNHLGKKGNRDLLCWGHYRFRQRLLHRVRGTDCEAITQDERYTSKTCGNCGVKNNKLGGKETFTYMKNKHLNVLDKTLT

SEQ ID NO: 587 - protein, 463 aa, Dreissena sp.; identical to SEQ ID NO: 586

SEQ ID NO: 588 - protein, 478 aa, Dreissena sp.
MKRKREDLTLWDAANVHKHKSMWYWWEYIRRKDMVNYEKTDCDVIQLLQSASVKKQKTQSDKFLTSFSVGIRPTKHQKRVLNEMLRVSNYTYNWCLWLVNEKGIRPHQFELQKIVCKTNANDVDPQYRIENDDWFFNNRMTSVKTTSCKNFYTSYKAAKSLKSKLKRPMSVSNIVQGSFCVPKLFIRNLSSKDVSIDNINMLNRYICMIPENFEKRSKPKERFLKLAKPITKIPPFDHDVKIVKRADGMFILNIPCDPKYTRRNASNDTIDKRVCGIDPGGRTFATVYDPIDCCVFQVGIKEDKQYVISKLHNKIDHAQMHLRKAQNKKQQQAARERIVSLKKTHLKLKTFVDDIHLKLSSHLVKEYQFVALGKINVAPLVKKKHLSKRAKRDLLYWQHYRFRQRLTHRTTNTECILDVQNEAYTSKTCGVCGTINKNLEKSETFYCDNCKYNTHRDVNGARNILLKSLRMFPFVNSQ

SEQ ID NO: 589 - protein, 482 aa, Dreissena sp.
MKRKREDLTLWDAAHVHKHKSMWYWWEYIRRKDMVNHEKTDCDVIQLLQSASVKKQKTQSDKFFTSFSVGIRPTKHQKRVLNEMLRVSNYTYNWCLWLVNEKGIEPHQFELQKIVCKTNANDVDPQYRMENDDWFFNNKMTSVKTTSCKNFYTSYKAAKSLKSKLKRPMSVSNIVQGSFCVPKLFVRNLSSKDVSIDNINMLNRYICMIPENFEKRSKPKERFLKLAKPITKIPPFDHDVKIVKRADGMFILNIPCDPKYTRRNASNDTIDKRVCGIDPGGRTFATVYDPIDCSVFQVGIEEDKQYVISKLHNKIYHAHKHLTKAQNKKQQQAASERIVSLKKTHLKLKTFVDDIHLKLSSHLVKEYEYVALGKINVAQLVKTDRPKPLSPRAKRDLLYWQHYRFRQRLTHRTTNTECILDVQNEAYTSKTCGVCGTINKNLEKSETFFCDQCKYNTHRDVNGARNILLKSLRMFPFEKQQQ

SEQ ID NO: 590 - protein, 482 aa, Dreissena sp.
MKRKRENFTLWDAANVHKHKSMWYWWEHIRRKDMVNHEKTDCDVIQLLQSASVKKQKTQSDKFLTSFSVGIRPTKHQKRVLNEMLRVSNYTYNWCLWLVDEKGQRPHLFELQKIVCKTTANDVDPYYRMENDDWFFNNKMSTIKLTSCKNFCTSYKSAKSLKSKLKRPMSVSNIIQGSFCVQKLFIRRLSDKDVSIDNTQMQNRYICMMPDNFEKRSNPKERFLKLAKPITKIPPIDHDVKIVKRADGMFIMNIPCDPKYTRRNASNNTIEKRVCGIDPGGRTFATVYDPIDCCVFQVGIKEDKQYVISKLHNKIDHAHMHLTKAQNKKQQQAARERIVSLKKTHLKLKTFVDDIHLKLSSHLVKEYEYVALGKINVAQLVKTDRPKPLSPRAKRDLLYWQHYRFRQRLTHRTTNTECILDVQNEAYTSKTCGVCGTINKNLEKSETFYCDNCKYNTHRDVNGARNILLKSLRMFPFVNSQL

SEQ ID NO: 591 - protein, 479 aa, Dreissena sp.
MKRKREDLTLWDAANVHKHKSMWYWWEYIRRKDLINHEKTDCDVIQLLQSASVKKQKTHSDDFLTSFSVGIRPTKHQKQVLNEMLRVSNYTYNWCLWLVNEKGLRPHQFELQKIVCKTNARDVDPQYRMENDDWFFNNKMTRVKGTSCKNFCTSYKSAKALKSKLKRPMPISNIIEGSFGVPNLYIRLLSSKDVCTHETNMQNRYICMMPDNFEKRSNPKERFLKLAKRITNIPPINHDVKIVKRADGMFIMNIPCDPKYTRRNASNDTIEKRVCGIDPGGRTFATVYDPIDCCVFQVGIKEDKQYVISKLHNKIDHAHMHLTKAQNKKQQQAARERIVSLKKTHLKLKTFVEDIHLKLSSHLVKEYHYVALGKINVAPMVKKKHLSKRAKRDLLYWQHYRFRQRLTHRTTNTDCIFEVQNEAYTSKTCGVCGKINENLEKSETFYCDQCKYNTHRDVNGARNILLKSLNMFPFEKKQQ

SEQ ID NO: 592 - protein, 482 aa, Dreissena sp.
MKRKREQLTLWDAANVHKHKSMWYWWQSIRRKDLVNHDKTACDVMELLQSASHKKQNTQSDKFLTSFSVGIRPTKHQKRVLNEMLRVSNYTYNWCLWLVNEKGLKPLQFTLQKIVCKTNAGDVDPQYRIENDEWFFNNKMSTIKLTSCKNFCTSYKSAKSLKSKLKRPMSVSNIVQGSFCVQKVLLRHLSGKDVFTNNANMQNQYICMMPDNFEKRSNPKERFLKLAKRITKIPPIDHDVKIVKRANGTFVLNIPCDPTYTRRNTSNDTIEKRVCGIDPGGRTFATVYDPIDCSVFQVGIEEDKQYVMSKLHNKINHAHKHLTKAQNKQQQQAAQERIVSLKKIHFKLKTFVDDIHLKLSSHLVKEYQYVALGKINVAQLVKTDRPKPLSPRSKRDLLNWQHFRFRQRLTHRTTNTDCILEVQNEAYTSMTCGVCGKIKKNLEKSETFYCDQCKYNTHRDVNGARNILLKSLHMFPFEKQQQ

SEQ ID NO: 593 - protein, 480 aa, Dreissena sp.
MKRKRENFTLWDAANVHKHKSMWYWWEHIRRKDMVNHEKTDCDVIQLLQSASVKKQKTQSDKILTSFSVGLRPTKHQKQVLNEMLRVSNYTYNWCLWLVDEKGQRPHLFELQKIVCKTTANDVDPYYRMENDDWFFNNKMSNIKLTSCKNFCTSYKSAKSLKSKLIRPMSVSNIIQGSFCVQKVLLRHLSDKDVSTDNMLNRYICMMPDNFEKRSKPKERFLKLAKPITKIPPIDHDVKIVKRADGMFIMNIPCDSKYTRRNASNDTIEKRVCGIDPGGRTFATVYDPIDCCVFQVGIKEDKQYVIRKLHDKIDHAHKHLTKAQKKKQQKAAQERIVSLKKIHFKLKTFVDDIHLKLSSHLVKEYKYVALGKINVAQLVKTDRPKPLSKRAKRDLLSWQHYRFRQRLTHRTTNTDCILEVQNEANTSKTCGVCGEKDDNLGKSETYYCIKCEYNTHRDVNGARNILLKSLHMFPFVNSQQ

SEQ ID NO: 594 - protein, 442 aa, Dreissena sp.
MVNHEKTDCDVIQLLQSASVKKQKTQSDKFLTSFSVGIRPTKHQKRVLNEMLRVSNYTYNWCLWLVNEKGIRPHQFELQKIVCKTNASDVDPQYRMANDDWFFNNKMTSIKTTSCKNFFTSYKAAKSLKSKLKRPMCVSNIIQGSFCVRKEFIRHLSGKDVSTDNMLNRYICMMPDNFEKRSKPKERFLKLAKPITNIPPINHDVKIVKRADGMFIMNIPCDPKYTRRNASNDTIEKRVCGIDPGGRTFATVYDPIDCCVFQVGIKEDKQYVISKLHNKIDHAHKHLTKAQNKKQQQAASERIVSLKKTHLKLKTFVEDIHLKLSSHLVKEYQYVALGKINVAQLVKTDRPKPLSKRAKRDLLSWQHYRFRQRLTHRTTNTDCILEVQNEANTSKTCGVCGEKDDNLGKSETYYCIKCEYNTHRDVNGARNILLKSLHMFPF

SEQ ID NO: 595 - protein, 352 aa, Dreissena sp.
MANDDWFFNNKMTSIKTTSCKNFFTSYKAAKSLKSKLKRPMCVSNIIQGSFCVRKEFIRHLSGKDVSTDNMLNRYICMMPDNFEKRSKPKERFLKLAKPITNIPPINHDVKIVKRADGMFIMNIPCDPKYTRRNASNDTIEKRVCGIDPGGRTFATVYDPIDCCVFQVGIKEDKQYVISKLHNKIDHAHKHLTKAQNKKQQQAASERIVSLKKTHLKLKTFVEDIHLKLSSHLVKEYQYVALGKINVAQLVKTDRPKPLSKRAKRDLLSWQHYRFRQRLTHRTTNTDCILEVQNEANTSKTCGVCGEKDDNLGKSETYYCIKCEYNTHRDVNGARNILLKSLHMFPFKKHQK

SEQ ID NO: 596 - protein, 337 aa, Dreissena sp.
MGCCKRPQTQSMWYWWQSIRRKDLVNHDKTACDVMELLQSASHKKQNTQSDKFLTSFSVGIRPTKHQKRVLNEMLRVSNYTYNWCLWLVNEKGLKPLQFTLQKIVCKTNAGDVDPQYRIENDEWFFNNKMSTIKLTSCKNFCTSYKSAKSLKSKLKRPMSVSNIVQGSFCVQKVLLRHLSGKDVFTNNANMQNQYICMMPDNFEKRSNPKERFLKLAKRITKIPPIDHDVKIVKRANGTFVLNIPCDPTYTRRNTSNDTIEKRVCGIDPGGRTFATVYDPIDCSVFQVGIEEDKQYVMSKLHNKINHAHKHLTKAQTNSNNKQHRNELYHCRKYTLS

SEQ ID NO: 597 - protein, 306 aa, Dreissena sp.
MKRKREDLTLWDAANVHKHKSMWYWWEYIRRKDLINHEKTDCDVIQLLQSASVKKQKTQSDKFLTSFSVGIRPTKHQKQVLNEMLRVSNYTYNWCLWLVNEKGLKPHQFELQKIVCKTNARDVDPQYRMANDDWFFNNKMTRVKGTSCKNFCTSYKSAKALKSKLKRPMPISNIIEGSFGVPNLYIRLLSSKDVCTHETNMQNRYICMMPDNFEKRSNPKERFLKLAKRITNIPPINHDVKIVKRADGMFIMNIPCDPKYTRRNASNDTIEKRVCGIDPGAVCHVRGSTIAANGVAKFRVTAKTEE

SEQ ID NO: 598 - protein, 282 aa, Dreissena sp.
MLNRYICMIPDNFEKRSKPKERFLKLAKPITKIPPIDHDVKIVKRADGMFIMNIPCDPKYTRRNASNDTIDKRVCGIDPGGRTFATVYDPIDCSVFQVGIEEDKQYVISKLHNKIYHAHKHLTKAQNKKQQQAASERIVSLKKTHLKLKTFVEDIHLKLSSHLVKEYQYVALGKINVAQLVKTDRPKPLSKRAKRDLLSWQHYRFRQRLTHRTTNTDCILEVQNEANTSKTCGVCGEKDDNLGKSETYYCIKCEYNTHRDVNGARNILLKSLSMFPFEKKQQ

SEQ ID NO: 599 - protein, 284 aa, Dreissena sp.
MTSVKGTSCKNFSTSYKSATSLKLKQKRPMSVSNIFQGSFCVPKKFIRHLSGSDVSIDNTNMQNRYICMMPDNFEKRSNPKERFLKIAKPITKIPPIDHDVKIVKRADGTFIMKIPCDPKYTRRNASNDSIEKRVCGIDPGGRTFATVYDQIESSVFQVGIEEDKQYLISKLHNKIDHAHMHLTKAQNKKQQQAARERIVSLKKTHLKLKTFVEDIHLKLSAHLVKEYQYVALGKINVAQLVKKNRPKPLSPRANRFAMLATLQISPKAYSPNYEHRMHIGCSK

SEQ ID NO: 600 - protein, 481 aa, Batillaria sp.
MKRTYSATKSSLTLWTAASVKTTSAPKVVTTFSGWMKKILPTRAETSLTLINPADIADPSPPKKKAKKTTPATPKPTLRIYKIGLRPSPAQRKTLNACIVAANFAYNQCVHLVQHKVCKPHLYDLQKIVAKMKTPEDINHRYAPDRDGWFWKSSTIVRLLATKDFCAAYKAIVSNKKKDVAVIKYKTYDDPEAINPLSGLFGCQKQYATVTQAGLRLLPRLFGKDPIPLVKKKPKVATIDHDFKIEKTSKGKFVLCLTVECSLLRRVKPPAPLFEDGYIHACGIDPGVRSFVTVYDPTRQDCYQFGTSAQKAERLDPITNAIDNWNSFVDQHRDKAPPTAIESWSRKTKKLWYKLKNQVRSLHDQVIAHLLGAYNFISLGKLDVSCFRRGTTAKSTNRWLRIYRHFEFRTKLLARVEGTDNCRVEITDERWTSKTCGMCRSIHRELGAKELFECPNCHYTCHRDVHGARNILLRSFGQFPV

SEQ ID NO: 601 - protein, 481 aa, Batillaria sp.
MKRTYSATKSSLTLWTAASVKTTSAPKVVTTFSGWMKKILPTRAETSLTLINPADIADPSPPKKKAKKTTPATPKPTLRIYKIGLRPSPAQRKTLNACIVAANFAYNQCVHLVQHKVCKPHLYDLQKIVAKMKTPEDINHRYAPDRDGWFWKSSTIVRLLATKDFCAAYKAIVSNKKKDVAVIKYKTYDDPEAINPLSGLFGCQKQYATVTQAGLRLLPRLFGKDPIPLVKKKLKVATIDHDFKIEKTSKGKFVLCLTVECSLLRRVKPPAPLFEDGYIHACGIDPGVRSFVTVYDPTRQDCYQFGTSAQKAERLDPITNAIDNWNSFVDQHRDKAPPTAIESWSRKTKKLWYKLKNQVRSLHDQVIAHLLGAYNFISLGKLDVSCFRRGTTAKSTNRWLRIYRHFEFRTKLLARVEGTDNCRVEITDERWTSKTCGMCRSIHRELGAKELFECPNCHYTCHRDVHVARNILLRSFGQFPV

SEQ ID NO: 602 - protein, 472 aa, Batillaria sp.
MKRTYSATKSSLTLWTAASVKTTSAPKVVTTFSGWMKKILPTRAETSLTLINPADIADPSPPKKKAKKTTPATPKPTLRIYKIGLRPSPAQRKTLNACIVAANFAYNQCVHLVQHKVCKPHLYDLQKIVAKMKTPEDINHRYAPDRDGWFWKSSTIVRLLATKDFCAAYKAIVSNKKKDVAVIKYKTYDDPEAINPLSGLFGCQKQYATVTQAGLRLLPRLFGKDPIPLVKKKLKVATIDHDFKIEKTSKGKFVLCLTVECSLLRRVKPPAPLFEDGYIHACGIDPGVRSFVTVYDPTRQDCYQFGTSAQKAERLDPITNAIDNWNSFVDQHRDKAPPTAIESWSRKTKKLWYKLKNQVRSLHDQVIAHLLGAYNFISLGKLDVSCFRRGTTAKSTNRWLRITDTLNFGQNCSLEWRELTTVEWRSPTNAGPQRRVACADPSTANLGQKNYSSAPTATTPATETCTELETSC

SEQ ID NO: 603 - protein, 457 aa, Elysia sp.
MAEKLRKTLWIPGNEPDSDCTVSITGKLNELVNSIDPAPEALGIYKVKFKLTRHQHNVLKDLLAASNLAWNWTKWLIEDKGIKRKDEKTLQSIVAKKSIEDPLMAPREVHDNAKLLHKTSTIRLTGMKSYLSALKSSMTLHKGRMEKFDVDYKELYPASGTFTVQKLFIKKFDISMVNKGVRSKVPEAFYRLSITPDSFGNRNEFTERFLRISKKRSYDRMPPINHDSQIQLRKDGHWLLLIPCDRSYLRCKQPESIEKSVVGVDPGGRTFQTTYDPIKREVKEFHSNKGAEFRYIELMKVKAKRHEEHAKNVKSFPKYKEHKAAARKYWHKYETKRNDLHRKLSSKMVRENKLIVIGDLSTKNACKKGGKLHKKSKDDLYTWAHYEFRQRLIDRARGTNTKVIVQDESYTSMTCGNCGHRKTDLGGDKVYNCTECGCSIGRDVNGGRNILIKAMIE

SEQ ID NO: 604 - protein, 459 aa, Elysia sp.
MAEIIRKQLWYPGYKPENLSGVVEKLKEVGASNDESALGTFKIKLRPTAYQKACLKRVLAASNLAWNWTKWLIEEKGVSWKDKKTMQAIVVKKSIESLENQDMVAPEVRANQQLLSKTTSVRLTAMCSFVAATKSSMTLHKGCTRKFDVGYKELYPRSGTFGVQKPYIRKFEESMLPAKMPTEARKNFNRLRLSILPNSFAAKGNPNERFLRIGKRRSWESMPPISHDCKVEMRKDGSWLLLIPCDRSYLRFSKPVAEKNHAVSLDPGVRTFQTEYNPFKQETRNHGSQRDKDRINFFKTKAQRHEVLAKTNKKEYVRKEHKRQADKYWHKHGKYRDNIHRELASKLVNENDLVIVGDFSSSRCAAKRAGSKLTKQTRAEMYSWAHYRFKQRLIERARGTGTRVHFQDESYTSKTCGNCGNIKEDLGGNKTYACEVCGVVMDRDVNGARNIMIKSLTKN

SEQ ID NO: 605 - protein, 720 aa, Contarinia sp.
MLFERSVQMTEVAALASLSILFILNEALDNDDRAFFLKPHPSLFIADCFRAVLNQHVNNINSQYRILPEFRFMVERNSEEQFRWPDDEKLGNGLRYFYKQYITNIQTNTNTWCEKRLENFFRMRCWYRNRFHNGSRFDNIDIRNAKEFSYRFKNLTNGNNVDPQRVEKFNILMRDLTEIGWSGTVSMKFFAKYRWFESLWLFGQMQRQIEVYHSHAEQWYTIHEMFRNNPNFQEPTINRPPKISSFALIPLCDYHLKNVRLDITDLYNKIVNELDLVPSFLNTQTNRMNKRNLKYYTQTDRSGLWNMLFDVGKINKLGKSKPFHHQILTDSVSISIMYKKPQRQQRPQRQQRPQQTTQANRGPEKLIGKKYIIGIDPNEKSWLTVVRRNIQKTPDEPAVEENIIIPNQRFHWETQQKKRDKEAKKLAGWFDIEEKEHLKTYPYRPPSPRNSTWKSYIEYRIKMLRKGMAAYATREYARLDLDHHIRSTRVNDQIAVRVTNNKPSLVQFGAWAMKPDRPFGIKKRKRCPGSRKFRVSIKKLGHSEVEMQDEWGTSQTCANCQERFPRHTKDDRFKVCYDCRAKKIDGLPDSVAGLPDIIVSTVNRRVLRRKRAIIKRQIIDGNREAVNEKIRTGRLMSKVKVTYKNWPLNVDDDDVVPQTVTWHRDIVAAKCIMLKGMNQLETEYSLFNVFALNYIGLCRIFDVPLPVSLLRPPDYNNNVN

SEQ ID NO: 606 - protein, 766 aa, Contarinia sp.
MDDDELDDNQPEESKYVVIKCGLQTILRQQHERIERVGEVVTKMLFERSVQMTEVAALASLSILFILNEALDNDDRAFFLKPHPSLFIADCFRAVLNQHVNNIRSQYRILPEFRFMVERNSEEQFRWPDDEKLGNGLRYFYKQYITNIQTNTNTWCEKRLENFFRMRCWYRNRFHNGSRFDNIDIRNAKEFSYRFKNLTNGNNGNNVDPQRVEKFNILMRDLTEIGWSGTVSMKFFAKYRWFESLWLFGQMQRQIEVYHSHAEQWHTIHEMFRNNPNFQEPTINRPPKISSFALIPLCDYHLKNVRLDIKDLYYKIVNELDLVPSFLNTRTNRMNKRNLKYYTQTDRSGLWNMLFDVGEINKLGKSKSFHHQILTDSVSISIMYKKPQRQQRPQRQQRPQQTTQANRGPEKLIGKKYIIGIDPNEKSWLTVVRRNIQKTPDEPAVEENIIIPNQRFHWETQQKKRDKEAKKLAGWFDIEEKEHLKTYPYRPPSPRNSTWKSYIEYRIKMLRKGMAAYATREYARLDLDHHIRSTRVNDQIAVCVTNNKPSLVQFGAWAMKPDRPFGIKKRKRCPGSRKFRVSIKKLGHSEVEMQDEWGTSQTCANCQERFPRHTKDDRFKVCYDCRAKKIDGLPDSVAGLPDIIVSTVNRRVLRRKRAIIKRQIIDGNREAVNEKLQTGRLMSKVKVTYKNWPLNVDDDDVVPQTVTWHRDIVAAKCIMLKGMNQLETEYSLFNVFALNYIGLCRIFDVPLPVSLLRPPDQNNNVN

SEQ ID NO: 607 - protein, 766 aa, Contarinia sp.
MDDDELDDNQPEESKYVVIKCGLQTILRQQHERIERVGEVVTKMLFERSVQMTEVAALASLSILFILNEALDNDDRAFFLKPHPSLFIADCFRAVLNQHVNNINSQYRILPEFRFMVERNSEEQFRWPDDEKLGNGLRYFYKQYITNIQTNTNTWCEKRLENFFRMRCWYRNRFHNGSRFDNIDIRNAKEFSYRFKNLTNGNNGNNVDPQRVEKFNILMRDLTEIGWSGTVSMKFFAKYRWFESLWLFGQMQRQIEVYHSHAEQWYTIHEMFRNNPNFQEPTINRPPKISSFALIPLCDYHLKNVRLDIKDLYNKIVNELDLVPSFLNTRTNRMNKRNLKYYTQTDRSGLWNMLFDVGEINKLGKSKSFHHQILTDSVSISIMYKKPQRQQRPQRQQRPQQTTQANRGPEKLIGKKYIIGIDPNEKSWLTVVRRNIQKTPDEPAVEENIIIPNQRFHWETQQKKRDKEAKKLAGWFDIEEKEHLKTYPYRPPSPRNSTWKSYIEYRIKMLRKGMAAYATREYARLDLDHHIRSTRVNDQIAVRVTNNKPSLVQFGAWAMKPDRPFGIKKRKRCPGSRKFRVSIKKLGHSEVEMQDEWGTSQTCANCQERFPRHTKDDRFKVCYDCRAKKIDGLPDSVAGLPDIIVSTVNRRVLRRKRAIIKRQIIDGNREAVNEKIRTGRLMSKVKVTYKNWPLNVDDDDVVPQTVTWHRDIVAAKCIMLKGMNQLETEYSLFNVFALNYIGLCRIFDVPLPVSLLRPPDYNNNVN

SEQ ID NO: 608 - protein, 766 aa, Contarinia sp.; identical to SEQ ID NO: 607

SEQ ID NO: 609 - protein, 766 aa, Contarinia sp.
MDDDELDDNQPEESKYVVIKCGLQTILRQQHERIERVGEVVTKMLFERSVQMTEVAALASLSILFILNEALDNDDRAFFLKPHPSLFIADCFRAVLNQHVNNIRSQYRILPEFRFMVERNSEEQFRWPDDEKLGNGLRYFYKQYITNIQTNTNTWCEKRLENFFRMRCWYRNRFHNGSRFDNIDIRNAKEFSYRFKNLTNGNNGNNVDPQRVEKFNILMRDLTEIGWSGTVSMKFFAKYRWFESLWLFGQMQRQIEVYHSHAEQWHTIHEMFRNNPNFQEPTINRPPKISSFALIPLCDYHLKNVRLDIKDLYYKIVNELDLVPSFLNTRTNRMNKRNLKYYTQTDRSGLWNMLFDVGEINKLGKSKSFHHQILTDSVSISIMYKKPQRQQRPQRQQRPQQTTQANRGPEKLIGKKYIIGIDPNEKSWLTVVRRNIQKTPDEPAVEENIIIPNQRFHWETQQKKRDKEAKKLAGWFDIEEKEHLKTYPYRPPSPRNSTWKSYIEYRIKMLRKGMAAYATREYARLDLDHHIRSTRVNDQIAVCVTNNKPSLVQFGAWAMKPDRPFGIKKRKRCPGSRKFRVSIKKLGHSEVEMQDEWGTSQTCANCQECFPRHTKDDRFKVCYDCRAKKIDGLPDSVAGLPDIIVSTVNRRVLRRKRAIIQRQIIDGNREAVNEKLQTGRLMSKVKVTYKNWPLNVDDDDVVPQTVTWHRDIVAAKCIMLKGMNQLETEYSLFNVFALNYIGLCRIFDVPLPVSLLRPPDQNNNVN

SEQ ID NO: 610 - protein, 607 aa, Bradysia sp.
MYETNFKNNVKTHAQKRIVRLFKLWFIEANGVKPSSRHMKVLKNAATFMFKRKSTVPRNPYLTQRLMMYMPPQIVAMVANSNERGFMNKLHNAFNWFRMVPLYLRIQSDIDQYQATCRAADEPIHVRNFHVVPLHNSKTKYIRIDSATLKLMLQHLKIHPTKPSLKQPNKRVCLTNAEFEDAVDPTGTFNPNWFNYFKWSAVKKMQRHKEFDYQFLTNGVAVSLQFIVDQPPEPETFEKVMEKQKIKYRKFGQRFNNNQYKTIIGIDPGYKLYLAAVSKDMRTNEETLFRLTSRKFHNMCQQNIRDRKAKRYTSQLETEMAHDREVNFGGTIASPMSATNYMLFIDHRLKHFNSCIALYTQNKYTELAFHKYVHTQKAMDGIVNELLPSSRSHERSLLVIGGTEFNPSAPIKKYRRCPGVRQLVKFVRKRTGCDIVYADEYNTSQVCGRCQRRFKTSDDETIQHKRWERKGARMRLCSNCTPNDNIIPLPTTINTRMSPRAQHLHRLAITNRLFFNVAAYSMEDAKRESDNIHYIAENCCYDVSHDKHTFDPNDRTTQLKCVWNRDISAARNILIKGVASITGIPAPRTLYRQTQINEENSSDESMD

SEQ ID NO: 611 - protein, 1288 aa, Bradysia sp.
MKNTKELSDSDTDIEKRQRKWQHQRQQKGNKKPKKRGQSNGNGNGKDSDDDFVSTKKVYNSPPKLPNVAAVGRRKNVIPKKPPVSSNVNVNVLDSPPKLPNVAAAPKKPPVSSAAINAALLNATTKDRSSSPSNATAASNPAINITSHRNTTSSIIGSGRTGSTQEVAHPLPIRQSPPPMEYGSEWDTDGEATIAQLKQMQRKRPSKKAHSTSTKPEVKQTPVQSNRKRAASTDEASDAVEATTKRSTSTKRSKASKRSKATKTQQDSADEAGDADEETTKRSTSTKRSKASKRSKVTKTQQDSADEAGDADEATTKRSTSTKRSKASKAQQRKDDDENGNRAVIQTQLEEIIFLGNVFDKSIRRFTCPFATCNVNYSTFLNLKNHVKKTHEETLQKPIETDTNNWRRIQNANNRFDITTVKQKLRPLIIDGETIIKKQRVLEPLATEKTEVATKVFDIMNKQAVELSKLAILFSSLVYFDVYNTISDPENGNEIDRIFEEEFNWKEMILEFKQFQRNTAKAKKPRPDKHNTFFDLCRKYDVETYFTETSQNAWNSIVDTFATNFKTNITTHLYSRIRKWLAFKLRDGKKKKDVCGKENRKDINNKIYHTIKFLFDSEKCTQAEEVQHELICELQKICQFPNFNHGGRSYFERLRYDFKEDGDDDLGKPKRKRKCAAPKKTTKKSKKKKKKTQNNGPRLNWFQMVPAMVRLQRRIYEINLSRKQTLIDAGIIKEKKKRKRKRKRKRKRKNESKPEPSSTENKRQAGGTKKKREIDPEATHYAKLPNFIVVPQNSFHTMHFPIDTKALFDILKNLPQFMAILNQAEFLELQIDDDPNRKTTNPFWYFLFNIQKMETATKKFGGRITTNGSDVSIQYCKLRKEKELTKAEILEMASNRKRKHDVIDSDSESESEDDDDDDDDNAKTIKTDPAIVSALTNITNMEDLSVSGVDLGVRNVAATVIRKWSKSSDGYEVHESNVLHKSKDYHYKAGFARRQRKGKKLHGEFDERYQKDRQSQPIEPSQRSPDYIKFLDSRLKWFNEGTATYMQRVVTNVKFDKFRSTQKQMMAMAKEIVGDINVHDKATTQPSKIRVVFVGNCSTPANSTIKGHRRSPGNAPIVRYLKQIPQTYVDATIDEYCTTKKCSRCYETLDDVEFSKERLKLCHNCKLAENSTSTNLVSTYQRKKVIAEAMIPITEDYPKPTQFERAQRVAMERTKRWSFGDKMRMAARIKLKSTTYTVNTTATLKHLYWNRDGNAARNIMQLGLCQYNDCLPIEFNKDEAFQRPKKKD

SEQ ID NO: 612 - protein, 1289 aa, Bradysia sp.
MKNTKELSSDSDTDIEKRQRKWQHQRQQKGNKKPKKRGQSNGNGNGKDSDDDFVSTKKVYNSPPKLPNVAAVGRRKNVIPKKPPVSSNVNVNVLDSPPKLPNVAAAPKKPPVSSAAINAALLNATTKDRSSSPSNATAASNPAINITSHRNTTSSIIGSGRTGSTQEVAHPLPIRQSPPPMEYGSEWDTDGEATIAQLKQMQRKRPSKKAHSTSTKPEVKQTPVQSNRKRAASTDEASDAVEATTKRSTSTKRSKASKRSKATKTQQDSADEAGDADEETTKRSTSTKRSKASKRSKVTKTQQDSADEAGDADEATTKRSTSTKRSKASKAQQRKDDDENGNRAVIQTQLEEIIFLGNVFDKSIRRFTCPFATCNVNYSTFLNLKNHVKKTHEETLQKPIETDTNNWRRIQNANNRFDITTVKQKLRPLIIDGETIIKKQRVLEPLATEKTEVATKVFDIMNKQAVELSKLAILFSSLVYFDVYNTISDPENGNEIDRIFEEEFNWKEMILEFKQFQRNTAKAKKSRPDKHNTFFDLCRKYDVETYFTETSQNAWNSIVDTFATNFKTNITTHLYSRIRKWLAFKLRDGKKKKDVCGKENRKDINNKIYHTIKFLFDSEKCTQAEEVQHELICELQKICQFPNFNHGGRSYFERLRYDFKEDGDDDLGKPKRKRKCAAPKKTTKKSKKKKKKTQNNGPRLNWFQMVPAMVRLQRRIYEINLSRKQTLIDAGIIKEKKKRKRKRKRKRKRKNESKPEPSSTENKRQAGGTKKKREIDPEATHYAKLPNFIVVPQNSFHTMHFPIDTKALFDILKNLPQFKAILNQAEFLELQIDDDPNRKTTNPFWYFLFNIQKMETATKKFGGRITTNGSDVSIQYCKLRKEKELTKAEILEMASNRKRKHDVIDSDSESESEDDDDDDDDNAKTIKTDPAIVSALTNITNMEDLSVSGVDLGVRNVAATVIRKWSKSSDGYEVHESNVLHKSKDYHYKAGFARRQRKGKKLHGEFDERYQKDRQSQPIEPSQRSPDYIKFLDSRLKWFNEGTATYMQRVVTNVKFDKFRSTQKQMMAMAKEIVGDINVHDKATTQPSKIRVVFVGNCSTPANSTIKGHRRSPGNAPIVRYLKQIPQTYVDATIDEYCTTKKCSRCYETLDDVEFSKERLKLCHNCKLAENSTSTNLVSTYQRKKVIAEAMIPITEDYPKPTQFERAQRVAMERTKRWSFGDKMRMAARIKLKSTTYTVNATATLKHLYWNRDGNAARNIMQLGLCQYNDCLPIEFNKDEAFQRPKKKD

SEQ ID NO: 613 - protein, 1289 aa, Bradysia sp.
MKNTKELSSDSDTDIEKRQRKWQHQRQQKGNKKPKKRGQSNGNGNGKDSDDDFVSTKKVYNSPPKLPNVAAVGRRKNVIPKKPPVSSNVNVNVLDSPPKLPNVAAAPKKPPVSSAAINAALLNATTKDRSSSPSNATAASNLAINITSHRNTTSSIIGSGRTGSTQEVAHPLPIRQSPPPMEYGSEWDTDGEATIAQLKQMQRKRPSKKAHSTSTKPEVKQTPVQSNRKRAASTDEASDAVEATTKRSTSTKRSKASKRSKATKTQQDSADEAGDADEETTKRSTSTKRSKASKRSKVTKTQQDSADEAGDADEATTKRSTSTKRSKASKAQQRKDDDENGNRAVIQTQLEEIIFLGNVFDKSIRRFTCPFATCNVNYSTFLNLKNHVKKTHEETLQKPIETDTNNWRRIQNANNRFDITTVKQKLRPLIIDGETIIKKQRVLEPLATEKTEVATKVFDIMNKQAVELSKLAILFSSLVYFDVYNTISDPENGNEIDRIFEEEFNWKEMILEFKQFQRNTAKAKKPRPDIHNTFFDLCRKYDVETYFTETSQNAWNSIVDTFATNFKTNITTHLYSRIRKWLAFKLRDGKKKKDVCGKENRKDINNKIYHTIKFLFDSEKCTQAEEVQHELICELQKICQFPNFNHGGRSYFERLRYDFKEDGDDDLGKPKRKRKCAAPKKTTKKSKKKKKKTQNNGPRLNWFQMVPAMVRLQRRIYEINLSRKQTLIDAGIIKEKKKRKRKRKRKRKRKNESKPEPSSTENKRQAGGTKKKREIDPEATHYAKLPNFIVVPQNSFHTMHFPIDTKALFDILKNLPQFKAILNQAEFLELQIDDDPNRKTTNPFWYFLFNIQKMETATKKFGGRITTNGSDVSIQYCKLRKEKELTKAEILEMASNRKRKHDVIDSDSESESEDDDDDDDDNAKTIKTDPAIVSALTNITNMEDLSVSGVDLGVRNVAATVIRKWSKSSDGYEVHESNVLHKSKDYHYKAGFARRQRKGKKLHGEFDERYQKDRQSQPIEPSQRSPDYIKFLDSRLKWFNEGTATYMQRVVTNVKFDKFRSTQKQMMAMAKEIVGDINVHDKATTQPSKIRVVFVGNCSTPANSTIKGHRRSPGNAPIVRYLKQIPQTYVDATIDEYCTTKKCSRCYETLDDVEFSKERLKLCHNCKLAENSTSTNLVSTYQRKKVIAEAMIPITEDYPKPTQFERAQRVAMERTKRWSFGDKMRMAARIKLKSTTYTVNTTATLKHLYWNRDGNAARNIMQLGLCQYNDCLPIEFNKDEAFQRPKKKD

SEQ ID NO: 614 - protein, 1110 aa, Bradysia sp.
MEYGSEWDTDGEATIAQLKQMQRKRPSKKAHSTSTKPEVKQTPVQSNRKRAASTDEASDAVEATTKRSTSTKRSKASKRSKATKTQQDSADEAGDADEETTKRSTSTKRSKASKRSKVTKTQQDSADEAGDADEATTKRSTSTKRSKASKAQQRKDDDENGNRAVIQTQLEEIIFLGNVFDKSIRRFTCPFATCNVNYSAFLNLKNHVKKTHEETLQKPIETDTNNWRRIQNANNRFDIATVKQKLRPLIIDGETIIKKQRVLEPLATEKTEVATKVFDIMNKQAVELSKLAILFSSLVYFDVYNTISDPENGNEIDRIFEEEFNWKEMILEFKQFQRNTAKAKKSRPDKHNTFFDLCRKYDVETYFTETSQNAWNSIVDTFATNFKTNITTHLYSRIRKWLAFKLRDGKKKKDVCGKENRKDINNKIYHTIKFLFDSEKCTQAEEVQHELICELQKICQFPNFNHGGRSYFERLRYDFKADGDDDLGKPKRKRKCAAPKKTTKKSKKKKKKTQNNGPRLNWFQMVPAMVRLQRRIYEINLSRKQTLIHAGIIKEKKKRKRKRKRKRKRKNESKPEPSSTENKRQAGGTKKKREIDPEATHYAKLPNFIVVPQNSFHTMHFPIDTKALFDILKNLPQFKAILNQAEFLELQIDDDPNRKTTNPFWYFLFNIQKMETATKKFGGRITTNGSDVSIQYCKLRKEKELTKAEILEMASNRKRKHDVIDSDSESESEDDDDDDDDDNAKTIKTDPAIVSALTNITNMEDLSVSGVDLGVRNVAATVIRKWSKSSDGYEVHESNVLHKSKDYHYKAGFARRQRKGKKLHGEFDERYQKDRQSQPIEPSQRSPDYIKFLDSRLKWFNEGTATYMQRVVTNVKFDKFRSTQKQMMAMAKEIVGDINVHDKATTQPSKIRVVFVGNCSTPANSTIKGHRRSPGNAPIVRYLKQIPQTYVDATIDEYCTTKKCSRCYQTLDDVEFSKERLKLCHNCKLAENSTSTNLVSTYQRKKVIAEAMIPITEDYPKPTQFERAQRVAMERTKRWSFGDKMRMAARIKLKSTTYTVNTTATLKHLYWNRDGNAARNIMQLGLCQYNDCLPIEFNKDEAFQRPKKKD

SEQ ID NO: 615 - protein, 1139 aa, unidentified
MEKKNDNVNSDRSPPSRQENEIRRVEELNNFHRRAVSRPFIQVLPSSNPLPQFNLTSNRSLELENRPPQQTSARIQRTVSSPFIPVLPFESNEGRVRRPLFDPTSMEEASSSTSGITEEEVSLDEIPSNVQIEKFQFFDENTRMSEGSGVDYCKSKEHDFDDDTTLSWQRNLGLMNIVSSSSFKDSSTPMDIDNEEKEEETTSSPTPKKRYKLNLKEEKLVEDVFSQQSTSKEQKLGRKTPLKKKKSLSPIPSTSRQADENDYLQSLNLQEEKDSTFKIPEPLATPSNMKKTTKSTARKEKQQQQQQTKFTIKTGFESFCPNEQIRTIVNDQVQMLSRMFILISLLVNFALRHPTNTFLLDEWSKNGPDYLTITYLFKEKEPVKSTKNAFLKKLREEFVPEFSEYMGRPFEKFDCTNLTSQVQQMAAQMNTNFTTNLTTHCRNRLAKFFKNELLKKSPSYKERKSRVIDEKSIEERDMKRKEEKRKRARKNKKKRIKWDKKKRMKRKSGRQKRIEKHNKCRNLYPNNKKMRDKLINIQSKTEQKSRNVDLRKIVYDARKTIGRNRGKKKSSKKPRIQPPKTTPKNKTCRNLQKEITPENETSDETSATIEKDKAEEEEEEEKEGYTIKTLIDNLLLNKCESEKLNQMNLEKLNFGDIEDKNTCHKFLPFYIRLQKYFVDEKIKGFMLVPIMKPGLKYICYTNTALSDLEIVFKKKQNKTEEKTPTKKMTRAEISKQEAEHKKLISPVKEKHKKLSSDKKILTRDIKLIKSEKNPYNKKRLAELQLKLKVLNEDLSIINSELKNISENHKKVVTERNQDKYLENERRWERLFNFSKLRVNKKKYKFSGTIMTDGIAVSVIYNVIKPKKIIDFSPTEQENVRDKTKYKILKGLDPGLKLAFGGVEREMQQDFDINSKDKPIKIPTATFRFETQECKRRSILYKVGNDPKTYYENLLETPEFKDNVNHRDPSLIIPCTKFLLRTFYDQQPNMENKKIARLRWDKYMLVQRETDYLADYLVGNREKKQLIAIGSPKISPWMRGHVRMPLKKVVRRLAEEQDKYKNLRLVFVDEFNTTKMCSTCDQKMKILRNRTAYCSSCRIAWNRDVNAGRNILNLALVRLGIIQKEQLPDSTKFRAIAEIE

SEQ ID NO: 616 - protein, 693 aa, unidentified
MRLKVRTPQLLLRRLIGARKQACTMESIMDGVTEPNLSIRVDSNAAGTGTIFGSITDEHLVLLFVLLRANPSRRPASGSSFSFFAMSGKRTKVDPPDKKTKRQCSDVGQRKARNKNTECSIVKCSLKSFCQKSASVLPWDSVLKDTNKAVAEAYILANLRVVRLCEAGRPIPALDQEFYYQCLSAVSVGLTARKKVDDEDLRQSVELYKSWRDPNVSFASSAHISYGWFQNASSQMATNASNHVVVNFYRRIQKYVKQRVGITGKERYELLRDVLAPTYAGSDERVLGFRRWIPRNAEGYIDKEKPHLILPVTYRFLQFIEQENYRKREGPRYEQLRSFSLLPMKRGFECSHFKMCKLGLYALLRRAGIQIPEIKRKEGQPCWNDVVDEWWHRLFKITKCETENRKFAGEISTDGKAVSIVLRKPKLPEPEKSPSLKKDPKQYNFGEVWGLDPGRRDLFVATNNFGETIACSTREFYEDAKYTSSNMTTRYWIDHNPKILEAIRNMPSPKTCSLQKLEAYVRFLSPRLDRLLDFRMAKPFRKLKFRRYIFMKNKLRELCAKLTARAGANTLIGFGDWSATDYGGFIKKCPTGPVKKLEKELKRYCIVDSVPEFRTSKLHADCRRELTYQYALRTCKDGIVRRVKVYSVLHYPHNGCFGMTVNRDQNASKNILLLTLPHFLGQDRHPACCRQGT

SEQ ID NO: 617 - protein, 605 aa, unidentified
MSCKRKKKADVPGKAKRQRPDVRERIKRNKTTEISVVKCSLNSFCNESARALPWESVLKDMNKAVKEAFILANIRVLHLCNVNRPIPPLDQVFYYNCLSAVSVDLRARRKIDDADLRQSVELYKSWLDSAVQYSSSAYISSGWFENASLQMATNASNHIVVNFYRRFQKYVKQRFGITGKDRYELLRDVLAPNYEDNNQLVTELRGWIPRNEDGFIDKANPHLMLPVMYRFLQFIEAENDSHHDDLEFQQLRTFSLLPLKRGFECSHFKMCKLGLHALLQRAGISIPPLQAKDGLVWNDVVNEWWYKLFKIAKFETEYRKFAGEILTDGKAVSIVLRKPKRPLQEKQTKKDSKTYNFSEVWGLDPGRRDLFVATNNFGQTISCSSREFYEEAKYKSSNKTTHYWIEHDPKILEAIRNMPSPKTCSLQILEMYVRFLIPRIDLLLDFRMAKPFRKLKFRRYIFMKKKLRELCQKLTARAGRNTLIGFGDWSATDYGGLIKKCPGGPVRKLEKELKHYCTVDSIPEFRTSKLHADCHRELTYQFALRKCKDEVVRLVKIYSVLHCRHNGCFGMTVNRDQNASKNILLLTLPHFFGQDRHPAFCRQRS

SEQ ID NO: 618 - protein, 690 aa, unidentified
  source 1..690: note = Cryptophycea
MSNIRIVKRKAKGFFKCEDLVTIKDAVKAAHRIMSDASILVRSYYLRWFQSSYPLDSDDKELELEHFHISMACSIVQGITRPPVRGVGPEQSVKIDVFNDMLDEYKRLYERAPNDKENETDLSLSHVLAYSIDNLLTAYKNNIEAHFSKYVKRFIRCDMLAKGFNKSEANRVAAIYTNAYIYDSSLDLEPDFMERLGLEATSYSSLFPSKINKGGFPRVYDLKANPWVYLPKMVMINQALETDFSSVEHKERRLLNPLPFYSSFVPMHIRIDTSGLSQLLMTKDRLDDFKRSYLAEFGVSLNIKNKGDMLASFEKIFGRKATSNREAGLYATEMWSFLTNLKTCRQWKELDGVVRKNDPKGTQWMFDNAVVTDGVSISFQVIDNSMFGRKAFSGRKKRVACQEANDEEDSKQVTREELKTSKLLGCDPGKRDILAITDGIKTICYTKGQRDMDTHKTIRLRTSLKRRRGCGLEEYETQVMNRFQKRSCHPEMFRRYACSRKRMEHMLLECYSHPVFREFKFLVYNKTKSSEHRFMHRVLETFKRPQTNLSKARCASGVMRMNALKEVQRHGDIIIGWGNWGKNPNALRCSAGPTPGIGIRRRFESLFKTTTVPEHYTSQECPSCKGRCLRKATGNPIMRHHLLRCTNDSCCSRWWNRNVAGAFNILTRLLDGQTLSGNETTGDGLGGDDL

SEQ ID NO: 619 - DNA, 2073 bp, unidentified
  source 1..2073: mol_type = other DNA; note = guillardia
atgtcaaacattaggattgtaaaacgaaaggcgaagggcttcttcaagtgtgaggacctagtcacaatcaaggatgctgtcaaggcagctcataggatcatgtcagatgcgtccatactcgtccggtcatattatctgcgatggttccagagctcatatccccttgattcagatgacaaggaacttgagcttgagcacttccatatatccatggcctgcagcatagtccagggtataacaaggcctccagtccgtggtgttggtcctgaacaatctgtcaagatagacgtcttcaatgacatgttagatgagtataagaggctgtacgagcgtgctccaaatgataaagagaacgaaacggacctctctctatcgcatgtcttagcatattccatcgacaaccttcttaccgcgtataaaaacaacatcgaagcccatttctcaaaatatgtcaaacgcttcatccgatgtgatatgttggctaagggcttcaataagtctgaggcaaacagagtggcggcaatatataccaatgcctatatttatgactcatccctcgacctggaaccagactttatggaaagattaggccttgaggcaacaagttattcatctctattcccctctaagataaataagggcggttttccaagggtctatgacctgaaggccaacccttgggtctatcttccaaagatggtcatgataaatcaggccttagagacagacttctcttctgtagagcataaggagaggaggctgctcaatccactgcccttctattcatcgtttgttccgatgcacatacggattgatacatccggcttatcgcagctgctgatgactaaggataggcttgatgatttcaagagatcttatcttgctgagtttggagtaagtctaaatataaagaacaagggtgatatgctagcaagttttgagaagatctttggccggaaggcaacatccaatagagaggccggattgtatgcaacagagatgtggagcttcttgacaaacctgaagacatgccgtcaatggaaggagcttgatggggttgttcgtaagaacgatcccaagggaacacaatggatgtttgacaatgctgttgtaacggacggtgtttcaatctcattccaggtgatcgataacagcatgtttggacggaaggccttctctggcaggaagaagagggtagcatgtcaggaggccaatgatgaagaagatagcaagcaggtaacaagagaagagctaaagacatcgaagctcttgggatgtgaccctgggaagagagacatcctagcaataacagatggcataaagactatctgttacaccaaggggcagagagacatggacacgcataagacaataaggttgagaaccagtctgaagaggcgccgaggctgcggcctagaggagtatgagacacaggtgatgaaccggttccagaaacggtcatgccatcctgagatgtttcgacgctatgcctgttccaggaagaggatggaacacatgctgcttgaatgttattctcatccagtctttagagagttcaaattcttggtttacaacaagactaagagctccgaacataggttcatgcatagggtgttggaaacattcaaacggccgcaaacaaacctgagcaaggcgaggtgtgcgtcaggagttatgcgtatgaatgccttgaaggaggtccaaaggcatggagatatcattatagggtggggcaactggggaaagaatccaaacgcgctacgatgctcggcaggaccaaccccaggcattggaataaggagaaggtttgaatcgctgttcaaaacaacaacagtgccagaacactacacctcccaagaatgtccgagttgtaagggacgatgcctaagaaaggcaactggcaacccgatcatgagacaccatctgcttcgttgtacaaacgatagttgctgtagcaggtggtggaatcggaatgtagccggggcgttcaacatcctaacaaggctgttggatggacaaacactatccggtaacgaaactaccggagacgggttaggaggtgacgacctctaa

SEQ ID NO: 620 - RNA, 153 nt, synthetic construct
  source 1..153: mol_type = other RNA
cactatccggtaacgaaactaccggagacgggttaggaggtgacgacctctaaaacctagaacttagagtgcaaaaacgccattacgattgtgatgcctattcaagggtgtcccaagtgtaaaaagaaagcactctaagagcattaaactcta

SEQ ID NO: 621 - DNA, 1437 bp, Mercenaria sp.
  source 1..1437: mol_type = other DNA
atgaagagaaaacgagaacagatgactttgtggaaagccgcgttcgtcaatggacgggaaacgttcaagtcatggattgacaaggcacgaatgctggaattgaactgtgacatctcttctgcaagctcgacacattactcggatctggatttgaaaagcaagtgtgctaagatagaagacaagtttatgtgtacattttctgtcggcattcgacctacttctaagcaaaaccgaactttgaaccagatgctgaaagtgagcaactacgcctacaattggtgtaatcacctagttaaggagaaagacttcaaacctaagcagttcgacttgcaaagagtggttactaaaacgaattcgcacgacgttccggccgagtacagacttcccggagacgactggtttttcgacaacaagatgtcttctatcaagttgaccgcctgtaagaacttttgcaccatgtacaagtctgctcgaaccaatcagaagaaaacaaaggtcgatctcagaaacaaagacactgctttgttacgcgaaggatcgttcgaagtgcagagacaatacgtgaggttgctaacggaaaaagacataccagacgaacgaattcggcaatcgagaatagccttaatggcagacaacttttcgaaatccaagaaggactggaaagaaaggtttctccgactttcgaaaaatgtgtctaagatacctcctttaaatcacgacatgaaagtgtgcaaacgtccgaacggaaaattcatactgcaaattccatgcgatccaatatgtacgcgacagatacaagtgcacacctcggactcgatatgttccatcgatcctggaggcaggacgttcgcgacgtgctacgatcctagcaatataaagacatttcaaatcggacctgaggcagacaagaaggaaatcattcacaaattccacaacaagatcgataatgttcaccgtctcttgtcatatgctcaaaagaaaaagcagacgcaagcagtgcaagacagaatcggacagctgaagaagctgcacttgaaactgaaaacgtacgtcgatgacgtgcacttgaaactgtgctcgtacctggtcaagaattacaaactggtcgttcttggcaggatatcggtttcgtccatcgtgagaaaagacagaccgaaccatttggccaaaaaaggcaacagggacttgctgtgttggcaacatttcagattcagacagagactgttacatagagttcgtggcacggactgcgaagcgatcgctcaagacgaacggtacacttcaaagacatgtggtaactgtggagtgcaaaacaacaaactgggtggaaatgaaacgtttcattgtaaaagttgcaactacaaaactcacagggacgtcaacggagcgagaaacattctttgcaaatacttgggacattttccatttgctacataa

SEQ ID NO: 622 - RNA, 109 nt, synthetic construct
  source 1..109: mol_type = other RNA
ttagggctcgattctttgccttctcgatgcatttattgccacagattttgctaatgcagtttctgaggcaagaatgtgttcgggtaaaaagagttaatgggcaaactat

SEQ ID NO: 623 - DNA, 1437 bp, Mercenaria sp.
  source 1..1437: mol_type = other DNA
atgaagagaaaacgagaacagatgactttgtggaaagccgcgtttgtcaacgggcaggaaacgttcaagtcctggattgacaaggcacgaatgctggaattgaactgtgacgtctcttctgcaagctcgacacattactctgatctgaacttgaagacaaagtgtgccaagacagacgacaaatttatgtgtaattattctgtctgcatacgaccgacttctaagcagaagcgaacgttgaaccagatgctcaaggtgagcaactatgcttacaattggtgcaattacctagttaaggagaaagacttcaaaccgaagcagttcgacttgcaaagaattgtcgctaaaacgaattcaacagacgttccggccgaatacaggcttccaggagacgactggtttttcgacaacaagatgtcctctatcaagttgaccgcctgtaagaacttttgcaccatgtacaagtctactcaaaccaaccagaagaaaacaaaggtcgatctcagaaacaaagacattgttcagttacgcgaaggatcgtttgaagttcaaagcaagtacgtgagattgctaacggaaaaagacataccaggcgaacgaattcggcaatcgagaattgctttgatgccagacagtttttcgaaatcaaagaaggactggaaagaaaggtttctcaggctttcgaaaaatgtatctaagataccacctttgagtcacgacatgaaggtatgcaaacgtccgaatgggaaattcatactgcagatttcatgcgatccaatatgtactcgacagatacaagtgcaaacttcagattcgatatgttcaatcgatccgggaggcaggacttttgcgacatgctatgatcctagcaatataaagacatttcagatcggacccgaggcagacaaaaaggaaatcattcacgaatttcacaacaagatcgattatgttcaccgtctcttgtcgcatgctcaggagaaaaagcagacgcaagcggtgcaagacagaatcggacaactgaagaagctgcacctcaaactgaaaacgtacgtcgacgacgtgcacttgaaattgtgctcgtacctggtcaagaactacaaactggtcgttctcggcaagatatcggtttcgtccatcgtgagaaaagacaggccgaaccatcttgccaaaagcgctaacagggacttgctctgttggcagcactacagattcagacagagattgttacacagagtccgtggcacggactgcgaagtgatcatacaagacgaacgttacacttccaagacctgtggtaattgcggtgagaagaacaacaaactcggtggaaaggaaacgtttacttgtgaaagttgcaattacaaaactcatcgagacgtcaacggagcgagaaacattctgtgcaaatacttgggactttttccatttgcagcgtaa

SEQ ID NO: 624 - RNA, 113 nt, synthetic construct
  source 1..113: mol_type = other RNA
ttcgggttcgattctatccccagggctcgaatgcatttttgtcacagattttgccaatgcaagatctgggggcaagaatgtctccgggtgaaaagagtcaggctggaaagatt

SEQ ID NO: 625 - DNA, 1495 bp, synthetic construct
  source 1..1495: mol_type = other DNA
atctcaacgaatgaagagaagtagagaggatgaacctactcatcctcctactaatccatctcttgcacacggcatcattccattctgggatgagtactcacaacaagtatcggatgaactttgggcatgttcaagagattcctttcatgagtttaatcagtacaacaacaagggatgcactgacagatggttcaaattttctcaattcactgtgattgaatcaaagccagtgtttgatgttccactcaatgttcattactctataacagaaaatgtggcttttgataactctaaaaagccacctcagctcaagaaggcaaagaagaatcaaaagacgccccaaaaatttcaagcagacaaatcattgaaaattcgtctctaccccaatgaacaagaaaggacaacattgaatcagtggatgggaactgctcgttggatctacaacaagtgtttagaattcaccaacaaatccaaaggtgtcaagaaaaataagaagaatttcagaacgtttgtggtgaacaacgataattatcagacagaaaatcagtgggttgtaaatactccttatgacgtaagagatgctgccgctaatgaattgttgactgcatttaaaacaaattttgaaaagaagaaagctggaatgattgacaagttcatgatccgtttcaggcgaaagaaagacagaaaagatcatttcgttctacattgcaagcactggaagaaaaagactggactgtattcttttataaggaacatcaagagtgccaaacctttgcctgaggagcttcagtacgattccatcattattaagaacaagttgaaccattattatttatgtattccacaagtactggacattaggggtgagaaccaagcccctcaacattcaggacaagttgtagcattggatccaggagtaagaacatttcagaccacctttgatttgaatggttattcaaccaaatggggctcaggaggtgccgaaagaattggtagattgtgttgcgcgtatgacaagttgcaatcgaagtggtctcaaccagaagtcagacattgcaaaagatacaagtacaagagagcaggaagaagaattcaacaaaagattagaaatattgtggatgatcttctcaagaaactgtgtttgtggctgtgtcgaaactaccaagtgattttacttccttcgtttgagactcagaaaatggtaaagaaactccataggagaattaatagcaagacagcaagaaaaatgttgacttggtcacattacagattcaagcaaagattgcttcacaaagctagagagcatccgtggacacacatttatattgtcaacgaagcgtatacatccaaaacttgctcatgttgtggacatgtttatacggttggatcatctgaagtgtttcgttgtccatcatgtggctcaatttttgacagagatatcaatggagcaagaaatattcttcttcgattccttactactcatagaattagtttt

SEQ ID NO: 626 - protein, 495 aa, synthetic construct
MKRSREDEPTHPPTNPSLAHGIIPFWDEYSQQVSDELWACSRDSFHEFNQYNNKGCTDRWFKFSQFTVIESKPVFDVPLNVHYSITENVAFDNSKKPPQLKKAKKNQKTPQKFQADKSLKIRLYPNEQERTTLNQWMGTARWIYNKCLEFTNKSKGVKKNKKNFRTFVVNNDNYQTENQWVVNTPYDVRDAAANELLTAFKTNFEKKKAGMIDKFMIRFRRKKDRKDHFVLHCKHWKKKTGLYSFIRNIKSAKPLPEELQYDSIIIKNKLNHYYLCIPQVLDIRGENQAPQHSGQVVALDPGVRTFQTTFDLNGYSTKWGSGGAERIGRLCCAYDKLQSKWSQPEVRHCKRYKYKRAGRRIQQKIRNIVDDLLKKLCLWLCRNYQVILLPSFETQKMVKKLHRRINSKTARKMLTWSHYRFKQRLLHKAREHPWTHIYIVNEAYTSKTCSCCGHVYTVGSSEVFRCPSCGSIFDRDINGARNILLRFLTTHRISF

SEQ ID NO: 627 - DNA, 1446 bp, synthetic construct
  source 1..1446: mol_type = other DNA
agagaagtagagaggatgaacctactcatcctcctactaatccatctcttgcacacggcatcattccattcatgggcatgttcaagagattcctttcatgagtttaatcagtacaacaacaagggatgcactgacggatggttcaacttttctcaattcactgtgattgaatcccagccagtatttgatgttccactcaatgttcatcactctataacagagaatgtggcttttgataactctaaaaagccacctcagctcaagaaggcaaagaagggtcagaagactccccaaaaatttcaagcggacaaatcaatgaaaattcgtctctaccccaatgaacaagaaaggacaacattgaatcagtggatgggaactgctcgttggatctacaacaagtgtttagaattcaccaacaaatccaaaggtgtcaagaaaaataagaagaatttcagaacgtttgtggtgaacaacgataattatcagacagaaaatcagtgggttgtaaatactccttatgacgtaagagatgctgccgctattgaattgttaactgcgttcaacactaattttgaaaagaagaaggctggaacgattgacaagttcatgatccgtttcaggcgaaagaaagacagaaaagatcatttcgttctgcgttgcaagcactggaagaaaaagagtggaatgtattcttttataaggaacatcaagagcgccgaacctttgcctgaggagcttcagtatgattccatcattattaagaacaagttgaaccattattatttatgtattccacaagtactggatattaggggtgagaaccaagcccctcaacattcaggacaagttgtagcattggatccaggagtaagaacatttcagaccacctttgatttgaatggttattcaaccaaatggggctcaggaggtgccgaaagaattggtagattgtgttgcgcgtatgacaagttacaatcgaagtggtctcaaccagaagtcagacattgcaaaagatacaagtacaagagagcaggaagaagaattcaacaaaagattagaaatattgtggatgatttacacaagaaactgtgtttgtggctgtgtcgaaactaccaagtgatcttacttccttcgtttgagactcagaaaatggtaaagaaactccacaggagaattaatagcaagacagcaagaaaaatgttgacttggtcacattacagattcaagcaaagattgcttcacaaagctagagagcatccgtggacacacatttatattgtcaacgaagcgtatacatccaaaacttgctcatgttgtggacatgtttatacggttggatcatcggaagtgtttcgttgtccatcatgtggctcaatttttgacagagatatcaatggagccagaaatattcttcttcgattccttactactcatagaattagtttt

SEQ ID NO: 628 - protein, 477 aa, synthetic construct
MNLLILLLIHLLHTASFHSWACSRDSFHEFNQYNNKGCTDGWFNFSQFTVIESQPVFDVPLNVHHSITENVAFDNSKKPPQLKKAKKGQKTPQKFQADKSMKIRLYPNEQERTTLNQWMGTARWIYNKCLEFTNKSKGVKKNKKNFRTFVVNNDNYQTENQWVVNTPYDVRDAAAIELLTAFNTNFEKKKAGTIDKFMIRFRRKKDRKDHFVLRCKHWKKKSGMYSFIRNIKSAEPLPEELQYDSIIIKNKLNHYYLCIPQVLDIRGENQAPQHSGQVVALDPGVRTFQTTFDLNGYSTKWGSGGAERIGRLCCAYDKLQSKWSQPEVRHCKRYKYKRAGRRIQQKIRNIVDDLHKKLCLWLCRNYQVILLPSFETQKMVKKLHRRINSKTARKMLTWSHYRFKQRLLHKAREHPWTHIYIVNEAYTSKTCSCCGHVYTVGSSEVFRCPSCGSIFDRDINGARNILLRFLTTHRISF

SEQ ID NO: 629 - DNA, 1494 bp, synthetic construct
  source 1..1494: mol_type = other DNA
tctcaacgaatgaagagaagtagagaggatgaacctactcatcctcctactaatccatctcttgcacacggcatcattccattctggaatgagtactcacaacaagtatcggataaactttgggcatgttcaagagattcctttcatgagtttaatcagtacaacaacaagggatgcacagacggatggttcaacttttctcaattcactgtgattgaatccaagccagtgtttgatgttccactcaatgtccatcactctataacagagaatgtggcttttgataactctaaaaagccacctcagctcaagaaagcaaaaaagaatcaaaagacgccccaaaaattgcaagcagacaaatcattgaaaatccgactctaccccaatgaacaagaaaggacaacattgaatcagtggatgggaactgctcgttggatctacaacaagtgcttagaatttacacacaatttcaaagatgtcaagaaaaataagaagaatttcagaacgtttgtggtgaataacgataattatcagacagaaaatcagtgggttgtgaatactccttatgacgtaagagacgctgccgctattgaattgttgactgcgttcaacactaattttgaaaagaagaaggctggaatgattgacaagttcatgatccgtttcaggcgaaagaaagacagaaaagatcattttgttctacattgcaagcactggaagaaaaagagtggactgtattcttttataaggaatatcaagagtgccgaacctttgcctgaggagcttcagtatgattccatcattattaagaacaagctgaaccattattatttatgtattccacaagtactggatattaggggtgagaaccaagcccctcaacattcaggacaagttgtagcattggatccaggagttagaacatttcagaccacctttgatttgaacggttattcaaccaaatggggctcaggaggtgccgaaagaattggtagattgtgttgcgcgtatgacaagttacaatcgaagtggtctcaaccagaagtcagacattgcaaaagatacaagtacaagagagcaggaagaagaattcaacaaaagattagaaatattgtggatgatttacacaagaaactgtgtttgtggttgtgtcgaaactaccaagtgatcttacttccttcgtttgagactcagaaaatggtaaagaaactccataggagaattaatagcaagacagcaagaaaaatgttgacttggtcacattacagattcaagcaaagattgcttcacaaagctagagagcatccgtggacacacatttatattgtcaacgaagcgtacacatccaaaacttgctcatgttgtggacatgtttatacggttggatcatctgaagtgtttcgttgtccatcatgtggctcaatttttgacagagatatcaatggagccagaaatattcttcttcgattccttactactcatggaattagtttt

SEQ ID NO: 630 - protein, 495 aa, synthetic construct
MKRSREDEPTHPPTNPSLAHGIIPFWNEYSQQVSDKLWACSRDSFHEFNQYNNKGCTDGWFNFSQFTVIESKPVFDVPLNVHHSITENVAFDNSKKPPQLKKAKKNQKTPQKLQADKSLKIRLYPNEQERTTLNQWMGTARWIYNKCLEFTHNFKDVKKNKKNFRTFVVNNDNYQTENQWVVNTPYDVRDAAAIELLTAFNTNFEKKKAGMIDKFMIRFRRKKDRKDHFVLHCKHWKKKSGLYSFIRNIKSAEPLPEELQYDSIIIKNKLNHYYLCIPQVLDIRGENQAPQHSGQVVALDPGVRTFQTTFDLNGYSTKWGSGGAERIGRLCCAYDKLQSKWSQPEVRHCKRYKYKRAGRRIQQKIRNIVDDLHKKLCLWLCRNYQVILLPSFETQKMVKKLHRRINSKTARKMLTWSHYRFKQRLLHKAREHPWTHIYIVNEAYTSKTCSCCGHVYTVGSSEVFRCPSCGSIFDRDINGARNILLRFLTTHGISF

SEQ ID NO: 631 - DNA, 1494 bp, synthetic construct
  source 1..1494: mol_type = other DNA
tctcaacgaatgaagagaagtagagaggatgaacccactcatcctcctactaatccatctcttgcacacggcatcattccattctgggatgagtactcacaacaagtatcggataaactttgggcatgttcaagagattcctttcatgagtttaatcagtacaacaacaagggatgcactgacggatggttcaacttttctcaattcactgtgattgaatccaagccagtgtttgatgttccactcagtgtccatcactctataacagagaatgtggcttttgataactctaaaaagccacctcagctcaagaaagcaaaaaagaatcaaaaggtggcccaaaaatttcaagcagacaaatccttgaaaatccgactctaccccaaagaacaagaaaggacaacattgaatcagtggatgggaactgctcgttggatctacaacaagtgtttagaatttacacacaacttcaaaggtgtcaagaaaaataagaagaatttccgaacggttgtggtgaacaatgataattatcagacagaaaatcagtgggttgtaaatactccttatgacgtaagagatgctgctgctattgaattgttgactgcgtttaaaacaaactttgaaaagaagaaagctggaacaattgacaagttcatgatccgtttaaggcgaaagaaagacagaaaagatcatttcgttctacattgcaagcactggaagaaaaagaatggactgtattcttttataaggaacatcaagagtgccgaacctttgcttgaggagcttcagtacgattccatcattattaagaacaagttgaaccgttattatttatgtattccacaagtactggaaattaggggtgagaaccaagcccctcaacattcaggacaagttgtagcgttggatccaggagtaagaacatttcagaccacctttgatttgaatggttattcaaccaaatggggctcaggaggtgccgaaagaattggtagattgtgttgcgcgtatgataagttacaatcgaagtggtctcaaccagaagtcagacattgcaaaagatacaagtacaagagagcaggaagaagaattcaacaaaagattagaaatattgtggatgatctacacaagaaactgtgtttgtggttgtgtcgaaactaccaagtgatcttacttccttcgtttgagactcagaaaatggtaaagaaactccataggagaattaatagcaagacagcaagaaaaatgttgacttggtcacattacagattcaagcaaagattgcttcacaaagctagagagcatccgtggacacacatttatattgtcaacgaagcgtacacatccaaaacttgctcatgttgtggacatgtttatacggttggattatctgaagtgtttcgttgtccatcatgtggctcaatttttgacagagatatcaatggagcaagaaatattcttcttcgattccttactactcatagaattagcttt

SEQ ID NO: 632 - protein, 495 aa, synthetic construct
MKRSREDEPTHPPTNPSLAHGIIPFWDEYSQQVSDKLWACSRDSFHEFNQYNNKGCTDGWFNFSQFTVIESKPVFDVPLSVHHSITENVAFDNSKKPPQLKKAKKNQKVAQKFQADKSLKIRLYPKEQERTTLNQWMGTARWIYNKCLEFTHNFKGVKKNKKNFRTVVVNNDNYQTENQWVVNTPYDVRDAAAIELLTAFKTNFEKKKAGTIDKFMIRLRRKKDRKDHFVLHCKHWKKKNGLYSFIRNIKSAEPLLEELQYDSIIIKNKLNRYYLCIPQVLEIRGENQAPQHSGQVVALDPGVRTFQTTFDLNGYSTKWGSGGAERIGRLCCAYDKLQSKWSQPEVRHCKRYKYKRAGRRIQQKIRNIVDDLHKKLCLWLCRNYQVILLPSFETQKMVKKLHRRINSKTARKMLTWSHYRFKQRLLHKAREHPWTHIYIVNEAYTSKTCSCCGHVYTVGLSEVFRCPSCGSIFDRDINGARNILLRFLTTHRISF

SEQ ID NO: 633 - DNA, 1494 bp, synthetic construct
  source 1..1494: mol_type = other DNA
tctcaaacaatgaagagaagtagagaggatgagcccactcatcctcctactaatccatctcttgcacacggcatcattccattctgggatgagtactcacaacaagtatcggataaactttgggcatgttcaagagattcctttcatgagtttaatcagtacaacaacaagggatgcacagacggatggttcaacttttctcaattcactgtgattgaatccaagccagtgtttgatgttccactcaatgtccatcactctataacagagaatgtggcttttgataactctaaaaagccacctcagctcaagaaagcaaaaaagaatcaaaaggtggcccaaaaatttcaagcagacaaatccttgaaaatccgactctaccccaatgaacaagaaaggacaacattgaatcagtggatgggaactgctcgttggatctataacaagtgtttagaattcactaacaaatccaaaggtgtcaagaaaaataagaagaatttcagaacgtttgtggtgaacaacgataattatcagacagaaaatcagtgggttgtgaatactccttatgacgtaagagatgctgccgctattgaattgttgactgcgttcaacactaattttgaaaagaagaaggctggaacgattgacaagttcatgatccgttttaggcgaaagaaagacagaaaagatcatttcgttctacattgcaagcactggaagaaaaagagtggactgtattcttttataaggaacatcaagagttccgaacctttgcctgaggagcttcagtacgattccatcattattaagaacaagttgaaccattattatttatgtattccacaagtactggatattaggggtgagaaccaagcccctcaacattcaggacaagttgtagcattggatccaggagtaagaacatttcagaccacctttgatttgaatggttattcaaccaaatggggctcaggaggtgccgaaagaattggtagattgtgttgcgcgtatgacaagttacaatcgaagtggtctcaaccagaagtcagacattgcaaaagatacaagtacaagagagcaggaagaagaattcaacaaaagattagaaatattgtggatgatttacacaagaaactgtgtttgtggttgtgtcgaaactaccaagtgattttacttccttcgtttgagactcagaaaatggtaaagaaactccacaggagaattaatagcaagacagcaagaaaaatgttgacttggtcacattacagattcaagcaaagattgcttcacaaagctagagagcatccgtggacacacatttatattgtcaacgaagcgtatacatccaaaacttgctcatgttgtggacatatttatacggttggatcatccgaagtgtttcgttgtccatcatgtggctcaatttttgacagagatatcaatgcagcaagaaatattcttcttcgattccttactactcatagaattagtttt

SEQ ID NO: 634 - protein, 495 aa, synthetic construct
MKRSREDEPTHPPTNPSLAHGIIPFWDEYSQQVSDKLWACSRDSFHEFNQYNNKGCTDGWFNFSQFTVIESKPVFDVPLNVHHSITENVAFDNSKKPPQLKKAKKNQKVAQKFQADKSLKIRLYPNEQERTTLNQWMGTARWIYNKCLEFTNKSKGVKKNKKNFRTFVVNNDNYQTENQWVVNTPYDVRDAAAIELLTAFNTNFEKKKAGTIDKFMIRFRRKKDRKDHFVLHCKHWKKKSGLYSFIRNIKSSEPLPEELQYDSIIIKNKLNHYYLCIPQVLDIRGENQAPQHSGQVVALDPGVRTFQTTFDLNGYSTKWGSGGAERIGRLCCAYDKLQSKWSQPEVRHCKRYKYKRAGRRIQQKIRNIVDDLHKKLCLWLCRNYQVILLPSFETQKMVKKLHRRINSKTARKMLTWSHYRFKQRLLHKAREHPWTHIYIVNEAYTSKTCSCCGHIYTVGSSEVFRCPSCGSIFDRDINAARNILLRFLTTHRISF

SEQ ID NO: 635 - DNA, 1164 bp, synthetic construct
  source 1..1164: mol_type = other DNA
tctcaaacaatgaagagaagtagagaggatgaacctactcatcctcctactaatccatctcttgcacacggcatcattccattctgggatgagtactcacaacaagtatcggatgaactttgggcatgttcaagagattcctttcatgagtttaatcagtacaacaacaagggatgcactgacggatggttcaacttttctcaattcactgtgattgaatccaagccagtgtttgatgttccactcaatgttcaccactccataacagagaatgtggcttttgataactctaaaaagccacctcagctcaagaaagcaaaaaagaatcaaaaggtggcccaaaaatttcaagcagacaaatccttgaaaatccgactctaccccaatgaacaagaaaggacaacattgaatcagtggatgggaactgctcgttggatctacaacaagtgcttagaatttacacacaacttcaaagatgtcaagaaaaacaagaagaatttcagaacgtttgtggtgaacaacgataattatcagacagaaaatcagtgggttgtgaatactccttatgacgtaagagatgctgccgctattgaattgttgactgcgttcaacactaattttgaaaagaagaaggctggaatgattgacaagttcatgatccgtttcaggcgaaagaaagacagaaaagatcattttgttctccactgcaagcactggaagaaaaagagtggactgtattcttttataaggaacatcaagagtgccgaacctttgcctgaggagcttcagtacgattccatcattattaagaacaagttgaaccattattatttatgtatcccacaagtactggatattaggggtgagaaccaagcccctcaacattcaggacaagttgtagcattggatccaggagtaagaacatttcagaccacctttgatttgaatggttattcaaccaaatggggctcaggaggtgccgaaagaattggtagattgtgttgcgcgtatgataagttgcaatcgaagtggtctcaaccagaagtcagacattgcaaaagatacaagtacaagagagcaggaagaagaattcaacaaaagattagaaatattgtggatgatcttcacaagaactgtgtttgtggctgtgtcgaaactaccaag

SEQ ID NO: 636 - protein, 385 aa, synthetic construct
MKRSREDEPTHPPTNPSLAHGIIPFWDEYSQQVSDELWACSRDSFHEFNQYNNKGCTDGWFNFSQFTVIESKPVFDVPLNVHHSITENVAFDNSKKPPQLKKAKKNQKVAQKFQADKSLKIRLYPNEQERTTLNQWMGTARWIYNKCLEFTHNFKDVKKNKKNFRTFVVNNDNYQTENQWVVNTPYDVRDAAAIELLTAFNTNFEKKKAGMIDKFMIRFRRKKDRKDHFVLHCKHWKKKSGLYSFIRNIKSAEPLPEELQYDSIIIKNKLNHYYLCIPQVLDIRGENQAPQHSGQVVALDPGVRTFQTTFDLNGYSTKWGSGGAERIGRLCCAYDKLQSKWSQPEVRHCKRYKYKRAGRRIQQKIRNIVDDLHKNCVCGCVETTK

SEQ ID NO: 637 - DNA, 990 bp, synthetic construct
  source 1..990: mol_type = other DNA
tctcaaacaatgaagagaagtagagaggatgaacctactcatcctcctactaatccatctcttgcacacggcatcattccattctgggatgagtactcacaacaagtatcggatgaactttgggcatgttcaagagattcctttcatgagtttaatcagtacaacaacaagggatgcactgacggatggttcaacttttctcaattcactgtgattgaatccaagccagtgtttgatgttccactcaatgttcatcactctataacagagaatgtggcttttgataactctaaaaagccacctcagctcaagaaagcaaaaaagaatcaaaaggtggcccaaaaatttcaagcagacaaatccttgaaaatccgactctaccccaatgaacaagaaaggacaacattgaatcagtggatgggaactgctcgttggatctacaacaagtgtttagaattcaccaacaaatccaaaggtgtcaagaaaaataagaagaatttcagaacgtttgtgaacaacgataattatcagacagaaaatcagtgggttgtgaatactccttatgacgtaagagatgctgccgctattgaattgttgactgcgttcaaaacgaacttcgaaaagaagaaggctggaacgattgacaagttcatgatccgttttaggcgaaagaaagacagaaaagatcattttgttctccactgcaagcactggaagaaaaagaacggactgtattcttttattaggaacatcaagagtgccgaacctttgcctgtggagcttcagtacgattccatcattattaagaacaagttgaaccattattatttatgtattccacaagtactggatattaggggtgagaaccaagcccctcaacattcaggacaagttgtagcattggatccaggagtaagaacatttcagaccacctttgatttgaatggttattcaaccaaaatggggctcaggaggtgccgaaagaattgg

SEQ ID NO: 638 - protein, 327 aa, synthetic construct
MKRSREDEPTHPPTNPSLAHGIIPFWDEYSQQVSDELWACSRDSFHEFNQYNNKGCTDGWFNFSQFTVIESKPVFDVPLNVHHSITENVAFDNSKKPPQLKKAKKNQKVAQKFQADKSLKIRLYPNEQERTTLNQWMGTARWIYNKCLEFTNKSKGVKKNKKNFRTFVNNDNYQTENQWVVNTPYDVRDAAAIELLTAFKTNFEKKKAGTIDKFMIRFRRKKDRKDHFVLHCKHWKKKNGLYSFIRNIKSAEPLPVELQYDSIIIKNKLNHYYLCIPQVLDIRGENQAPQHSGQVVALDPGVRTFQTTFDLNGYSTKMGLRRCRKNW

SEQ ID NO: 639 - protein, 214 aa, synthetic construct
NTLSFILEEFKSDEEVIQSFCKYKTLLRNENVLETAEALFNELNSIDLTHIFISHKKLETISSALCDHWDTLRNALYERRISELTGKITKSAKEKVQRSLKHEDINLQEIISAAGKELSEAFKQKTSEILSHAHAALDQPLPTTLKKQEEKEILKSQLDSLLGLYHLLDWFAVDESNEVDPEFSARLTGIKLEMEPSLSFYNKARNYATKKPYS

SEQ ID NO: 640 - protein, 222 aa, synthetic construct
NLRNIPRFFGESKKEQFNKFINKSLPTIDVGLKILEDIRNALETVSVRKPPSITEEYVTKQLEKLSRKYKINAFNSNRFKQITEQVLRKYNNGELPKISEVFYRYPRESHVAIRILPVKISNPRKDISYLLDKYQISPDWKNSNPGEVVDLIEIYKLTLGWLLSCNKDFSMDFSSYDLKLFPEAASLIKNFGSCLSGYYLSKMIFNCITSEIKGMITLYTRD

SEQ ID NO: 641 - protein, 177 aa, synthetic construct
PVVERRENEVDWWNTINEVKKLIDAKRDMGRVFWSGVTAEKRNTILEGYNYLPNENDHKKREGSLENPKKPAKRQFGDLLLYLEKKYAGDWGKVFDEAWERIDKKIAGLTSHIEREEARNAEDAQSKAVLTDWLRAKASFVLERLKEMDEKEFYACEIQLQKWYGDLRGNPFAVEAE
